(19) United States
(12) Patent Application Publication
(10) Pub. No.: US 2023/0272056 A1
(43) Pub. Date: Aug. 31, 2023

(54) AFFINITY MATURED ANTI-LAP ANTIBODIES AND USES THEREOF

(71) Applicant: Merck Sharp & Dohme LLC, Rahway, NJ (US)

(72) Inventors: Chung-Ming Hsieh, Newton, MA (US); Michelle Castor, Jamaica Plain, MA (US); Ming-Tang Chen, Dover, MA (US); Alan C. Cheng, San Francisco, CA (US); Scott A. Hollingsworth, Redwood City, CA (US); Veronica M. Juan, Redwood City, CA (US); Madhura Shidhore, Winchester, MA (US); Song Yang, San Francisco, CA (US); Renee C.T. Moore, Medway, MA (US)

(73) Assignee: Merck Sharp & Dohme LLC, Rahway, NJ (US)

(21) Appl. No.: 17/916,664

(22) PCT Filed: Apr. 8, 2021
(86) PCT No.: PCT/US2021/026310

§ 371 Date: Oct. 3, 2022

Related U.S. Application Data
(60) Provisional application No. 63/007,707, filed on Apr. 9, 2020.

(51) Int. Cl. C07K 16/22

(52) U.S. Cl. CPC C07K 16/22; C07K 2317/565; C07K 2317/55; C07K 2317/92; C07K 2317/24

(57) ABSTRACT

Provided herein are anti-LAP antibodies (e.g., recombinant humanized, chimeric, and human anti-LAP antibodies) or antigen binding fragments thereof which have therapeutically beneficial properties, such as binding specifically to LAP-TGFβ1 on cells but not to LAP-TGFβ1 in extracellular matrix, as well as compositions including the same. Also provided are uses of these antibodies or antigen binding fragments in therapeutic applications, such as in the treatment of cancer, and diagnostic applications.

### FIELD OF THE INVENTION

[0001] The present invention relates to affinity matured anti-LAP antibodies or antigen binding fragments thereof. Another aspect of the invention relates to compositions and kits comprising the anti-LAP antibodies or antigen binding fragments. Another aspect of the invention relates to methods for treating diseases, for example cancer, by administering the antibodies or antigen binding fragments.

### RELATED APPLICATIONS

[0002] This application claims the benefit of U.S. Provisional Patent Application No. 63/007,707, filed Apr. 9, 2020, which is incorporated by reference herein in its entirety.

### REFERENCE TO SEQUENCE LISTING SUBMITTED ELECTRONICALLY

[0003] The instant application contains a Sequence Listing which has been submitted electronically in ASCII format and is hereby incorporated by reference in its entirety. Said ASCII copy, created on Mar. 22, 2021, is named 24979USPCT-SEQLIST-22MAR2021.txt and is 1,903,429 bytes in size.

### BACKGROUND

[0004] Transforming growth factor beta 1 (TGFβ1) is synthesized as a pro-protein complex, in which the mature cytokine is caged within LAP (latency associated peptide), which is the latency associated peptide of TGFβ1. The LAP-TGFβ1 complex is disulfide bonded to one of five currently known anchor proteins: glycoprotein A repetitions predominant (GARP), Leucine-rich repeat-containing protein 33 (LRRC33), latent-transforming growth factor beta-binding protein 1 (LTBP1), latent-transforming growth factor beta-binding protein 3 (LTBP3), and latent-transforming growth factor beta-binding protein 4 (LTBP4). These anchor proteins localize latent TGFβ1 in particular sites and on particular cells within the body.

[0005] GARP, also referred to as leucine-rich repeat protein 32 or LRRC32, is a transmembrane protein that anchors LAP-TGFβ1 to the surface of lymphocytes, most notably regulatory T cells. GARP is also expressed on platelets, B cells, Natural Killer (NK) cells, fibroblasts, mesenchymal stromal cells, mesenchymal stem cells, and endothelial cells and also governs LAP-TGFβ1 expression on those cell types. LRRC33 is a transmembrane protein that is reported to anchor LAP-TGFβ1 to the surface of myeloid cells, most notably macrophages, dendritic cells, and myeloid derived suppressor cells (MDSCs). LTBP1, LTBP3, and LTBP4 are secreted molecules that anchor LAP-TGFβ1 into the extracellular matrix (ECM).

[0006] Although LAP binding agents have been used in the art as tools to identify certain cell populations, little is known about LAP's relevance in disease states. Recent developments in cancer therapy have focused on harnessing a patient's immune system by, e.g., activation of exhausted immune cell populations, vaccination, and removal of immunosuppressive cell populations. Given the ongoing need for improved strategies for targeting (and diagnosing) diseases such as cancer, improved agents and methods that are useful for these purposes are desired.

### SUMMARY

[0007] An aspect of the invention provides an antibody or antigen binding fragment thereof that binds to LAP and/or a complex comprising LAP/TGFβ1. For example, the LAP is a human LAP and/or the complex comprises human LAP/TGFβ1. In various embodiments, the antibody or antigen binding fragment thereof binds LAP that comprises at least one amino acid sequence selected from the group consisting of SEQ ID NOs: 1-7 and 1562-1564. In various embodiments, the antibody or antigen binding fragment thereof binds a portion of at least one amino acid sequence selected from the group consisting of SEQ ID NOs: 1-7 and 1562-1564. In various embodiments, the antibody or antigen binding fragment binds to human LAP, cynomolgus monkey (cyno) LAP, rat LAP, and/or mouse LAP. The antibody or antigen binding fragment thereof comprises at least one amino acid sequence described in one of the Tables herein, for example, an antibody or antigen binding fragment (e.g., HCDR1, HCDR2, HCDR3, LCDR1, LCDR2, LCDR3, heavy chain variable region, light chain variable region, heavy chain, or light chain) having an amino acid sequence described in Tables 4, 6, 8, and 11-43. In various embodiments, the antibody is an isolated antibody. In various embodiments, the antibody or antigen binding fragment thereof is a monoclonal antibody. In various embodiments, the antibody or antigen binding fragment thereof is an isolated monoclonal antibody. In various embodiments, the antibody or antigen binding fragment thereof is affinity matured. In various embodiments, the antibody or antigen binding fragment thereof is an affinity matured variant of the parental 20E6 antibody or antigen binding fragment thereof (WO2020076969) comprising heavy chain complementarity determining regions (CDRs) and light chain CDRs found in Table 6. The amino acid sequences for the heavy chain variable region and the light chain variable region for the parental 20E6 antibody are listed below.

parental 20E6-VH
(SEQ ID NO: 2227)
EVQLVQSGAEVKKPGASVKVSCKASGYTFTSYWMH
WVRQAPGQGLEWMGRIDPQSGGIKYAQKFQGRATL
TVDTSTSTAYMELSRLRSDDTAVYYCARWDYGGYF
DVWGQGTLVTVSS
parental 20E6-VL
(SEQ ID NO: 2228)
DIQMTQSPSSLSASVGDRVTITCRASQDITNYLNW
YQQKPGKAVKLLIYYTSRLHSGVPSRFSGSGSGTD
YTLTISSLQPEDFATYFCQQGDTLPWTFGQGTKLE
IK

[0008] In various embodiments, the antibody or antigen binding fragment thereof is an affinity matured variant of the 20E6 antibody or antigen binding fragment thereof comprising a heavy chain variable region comprising CDR1, CDR2, and CDR3 regions comprising the amino acid sequences of SEQ ID NOs: 445, 446, and 447, respectively, and/or a light chain variable region comprising CDR1, CDR2, and CDR3 regions comprising the amino acid sequences of SEQ ID NOs: 450, 451, and 452, respectively. In various embodiments, the 20E6 antibody or antigen binding fragment thereof comprises a heavy chain variable region comprising the amino acid sequence of SEQ ID NO: 448 and/or a light chain variable region comprising the amino acid sequence of SEQ ID NO: 453. In various embodiments, the 20E6 antibody or antigen binding fragment thereof comprises a heavy chain comprising the amino acid sequence of SEQ ID NO: 449 and/or a light chain comprising the amino acid sequence of SEQ ID NO: 454.

[0009] An aspect of the invention provides an antibody or antigen binding fragment thereof comprising heavy chain CDRs and light chain CDRs found within a heavy chain variable region and a light chain variable region described in any of Tables 4, 6, 8, 11-43, and 45.

[0010] An aspect of the invention provides an antibody (e.g., an isolated antibody) or antigen binding fragment thereof which specifically binds to LAP and/or a complex comprising LAP/TGFβ1-comprising:
[0011] (a) a heavy chain variable region comprising CDR1, CDR2, and CDR3 regions comprising the amino acid sequences of SEQ ID NOs: 1285, 1286, and 1287, respectively, and/or a light chain variable region comprising CDR1, CDR2, and CDR3 regions comprising the amino acid sequences of SEQ ID NOs: 1289, 1290, and 1291, respectively;
[0012] (b) a heavy chain variable region comprising CDR1, CDR2, and CDR3 regions comprising the amino acid sequences of SEQ ID NOs: 1277, 1278, and 1279, respectively, and/or a light chain variable region comprising CDR1, CDR2, and CDR3 regions comprising the amino acid sequences of SEQ ID NOs: 1281, 1282, and 1283, respectively;
[0013] (c) a heavy chain variable region comprising CDR1, CDR2, and CDR3 regions comprising the amino acid sequences of SEQ ID NOs: 1269, 1270, and 1271, respectively, and/or a light chain variable region comprising CDR1, CDR2, and CDR3 regions comprising the amino acid sequences of SEQ ID NOs: 1273, 1274, and 1275, respectively;
[0014] (d) a heavy chain variable region comprising CDR1, CDR2, and CDR3 regions comprising the amino acid sequences of SEQ ID NOs: 1261, 1262, and 1263, respectively, and/or a light chain variable region comprising CDR1, CDR2, and CDR3 regions comprising the amino acid sequences of SEQ ID NOs: 1265, 1266, and 1267, respectively;
[0015] (e) a heavy chain variable region comprising CDR1, CDR2, and CDR3 regions comprising the amino acid sequences of SEQ ID NOs: 1253, 1254, and 1255, respectively, and/or a light chain variable region comprising CDR1, CDR2, and CDR3 regions comprising the amino acid sequences of SEQ ID NOs: 1257, 1258, and 1259, respectively;
[0016] (f) a heavy chain variable region comprising CDR1, CDR2, and CDR3 regions comprising the amino acid sequences of SEQ ID NOs: 1245, 1246, and 1247, respectively, and/or a light chain variable region comprising CDR1, CDR2, and CDR3 regions comprising the amino acid sequences of SEQ ID NOs: 1249, 1250, and 1251, respectively;
[0017] (g) a heavy chain variable region comprising CDR1, CDR2, and CDR3 regions comprising the amino acid sequences of SEQ ID NOs: 1237, 1238, and 1239, respectively, and/or a light chain variable region comprising CDR1, CDR2, and CDR3 regions comprising the amino acid sequences of SEQ ID NOs: 1241, 1242, and 1243, respectively;
[0018] (h) a heavy chain variable region comprising CDR1, CDR2, and CDR3 regions comprising the amino acid sequences of SEQ ID NOs: 1229, 1230, and 1231, respectively, and/or a light chain variable region comprising CDR1, CDR2, and CDR3 regions comprising the amino acid sequences of SEQ ID NOs: 1233, 1234, and 1235, respectively;
[0019] (i) a heavy chain variable region comprising CDR1, CDR2, and CDR3 regions comprising the amino acid sequences of SEQ ID NOs: 1221, 1222, and 1223, respectively, and/or a light chain variable region comprising CDR1, CDR2, and CDR3 regions comprising the amino acid sequences of SEQ ID NOs: 1225, 1226, and 1227, respectively;
[0020] (j) a heavy chain variable region comprising CDR1, CDR2, and CDR3 regions comprising the amino acid sequences of SEQ ID NOs: 1213, 1214, and 1215, respectively, and/or a light chain variable region comprising CDR1, CDR2, and CDR3 regions comprising the amino acid sequences of SEQ ID NOs: 1217, 1218, and 1219, respectively;
[0021] (k) a heavy chain variable region comprising CDR1, CDR2, and CDR3 regions comprising the amino acid sequences of SEQ ID NOs: 95, 96, and 97, respectively, and/or a light chain variable region comprising CDR1, CDR2, and CDR3 regions comprising the amino acid sequences of SEQ ID NOs: 100, 101, and 102, respectively;
[0022] (l) a heavy chain variable region comprising CDR1, CDR2, and CDR3 regions comprising the amino acid sequences of SEQ ID NOs: 105, 106, and 107, respectively, and/or a light chain variable region comprising CDR1, CDR2, and CDR3 regions comprising the amino acid sequences of SEQ ID NOs: 110, 111, and 112, respectively;
[0023] (m) a heavy chain variable region comprising CDR1, CDR2, and CDR3 regions comprising the amino acid sequences of SEQ ID NOs: 115, 116, and 117, respectively, and/or a light chain variable region comprising CDR1, CDR2, and CDR3 regions comprising the amino acid sequences of SEQ ID NOs: 120, 121, and 122, respectively;
[0024] (n) a heavy chain variable region comprising CDR1, CDR2, and CDR3 regions comprising the amino acid sequences of SEQ ID NOs: 125, 126, and 127, respectively, and/or a light chain variable region comprising CDR1, CDR2, and CDR3 regions comprising the amino acid sequences of SEQ ID NOs:130, 131, and 132, respectively;
[0025] (o) a heavy chain variable region comprising CDR1, CDR2, and CDR3 regions comprising the amino acid sequences of SEQ ID NOs: 135, 136, and 137, respectively, and/or a light chain variable region comprising CDR1, CDR2, and CDR3 regions comprising the amino acid sequences of SEQ ID NOs: 140, 141, and 142, respectively;
[0026] (p) a heavy chain variable region comprising CDR1, CDR2, and CDR3 regions comprising the amino acid sequences of SEQ ID NOs: 145, 146, and 147, respectively, and/or a light chain variable region comprising CDR1, CDR2, and CDR3 regions comprising the amino acid sequences of SEQ ID NOs: 150, 151, and 152, respectively;
[0027] (q) a heavy chain variable region comprising CDR1, CDR2, and CDR3 regions comprising the amino acid sequences of SEQ ID NOs: 155, 156, and 157, respectively, and/or a light chain variable region comprising CDR1, CDR2, and CDR3 regions comprising the amino acid sequences of SEQ ID NOs: 160, 161, and 162, respectively;
[0028] (r) a heavy chain variable region comprising CDR1, CDR2, and CDR3 regions comprising the amino acid sequences of SEQ ID NOs: 165, 166, and 167, respectively, and/or a light chain variable region comprising CDR1, CDR2, and CDR3 regions comprising the amino acid sequences of SEQ ID NOs: 170, 171, and 172, respectively;
[0029] (s) a heavy chain variable region comprising CDR1, CDR2, and CDR3 regions comprising the amino acid sequences of SEQ ID NOs: 175, 176, and 177, respectively, and/or a light chain variable region comprising CDR1, CDR2, and CDR3 regions comprising the amino acid sequences of SEQ ID NOs: 180, 181, and 182, respectively;
[0030] (t) a heavy chain variable region comprising CDR1, CDR2, and CDR3 regions comprising the amino acid sequences of SEQ ID NOs: 185, 186, and 187, respectively, and/or a light chain variable region comprising CDR1, CDR2, and CDR3 regions comprising the amino acid sequences of SEQ ID NOs: 190, 191, and 192, respectively;
[0031] (u) a heavy chain variable region comprising CDR1, CDR2, and CDR3 regions comprising the amino acid sequences of SEQ ID NOs: 195, 196, and 197, respectively, and/or a light chain variable region comprising CDR1, CDR2, and CDR3 regions comprising the amino acid sequences of SEQ ID NOs: 200, 201, and 202, respectively;
[0032] (v) a heavy chain variable region comprising CDR1, CDR2, and CDR3 regions comprising the amino acid sequences of SEQ ID NOs: 205, 206, and 207, respectively, and/or a light chain variable region comprising CDR1, CDR2, and CDR3 regions comprising the amino acid sequences of SEQ ID NOs: 210, 211, and 212, respectively;
[0033] (w) a heavy chain variable region comprising CDR1, CDR2, and CDR3 regions comprising the amino acid sequences of SEQ ID NOs: 215, 216, and 217, respectively, and/or a light chain variable region comprising CDR1, CDR2, and CDR3 regions comprising the amino acid sequences of SEQ ID NOs: 220, 221, and 222, respectively;
[0034] (x) a heavy chain variable region comprising CDR1, CDR2, and CDR3 regions comprising the amino acid sequences of SEQ ID NOs: 225, 226, and 227, respectively, and/or a light chain variable region comprising CDR1, CDR2, and CDR3 regions comprising the amino acid sequences of SEQ ID NOs: 230, 231, and 232, respectively;
[0035] (y) a heavy chain variable region comprising CDR1, CDR2, and CDR3 regions comprising the amino acid sequences of SEQ ID NOs: 235, 236, and 237, respectively, and/or a light chain variable region comprising CDR1, CDR2, and CDR3 regions comprising the amino acid sequences of SEQ ID NOs: 240, 241, and 242, respectively;
[0036] (z) a heavy chain variable region comprising CDR1, CDR2, and CDR3 regions comprising the amino acid sequences of SEQ ID NOs: 245, 246, and 247, respectively, and/or a light chain variable region comprising CDR1, CDR2, and CDR3 regions comprising the amino acid sequences of SEQ ID NOs: 250, 251, and 252, respectively;
[0037] (aa) a heavy chain variable region comprising CDR1, CDR2, and CDR3 regions comprising the amino acid sequences of SEQ ID NOs: 255, 256, and 257, respectively, and/or a light chain variable region comprising CDR1, CDR2, and CDR3 regions comprising the amino acid sequences of SEQ ID NOs: 260, 261, and 262, respectively;
[0038] (bb) a heavy chain variable region comprising CDR1, CDR2, and CDR3 regions comprising the amino acid sequences of SEQ ID NOs: 265, 266, and 267, respectively, and/or a light chain variable region comprising CDR1, CDR2, and CDR3 regions comprising the amino acid sequences of SEQ ID NOs: 270, 271, and 272, respectively;
[0039] (cc) a heavy chain variable region comprising CDR1, CDR2, and CDR3 regions comprising the amino acid sequences of SEQ ID NOs: 275, 276, and 277, respectively, and/or a light chain variable region comprising CDR1, CDR2, and CDR3 regions comprising the amino acid sequences of SEQ ID NOs: 280, 281, and 282, respectively;
[0040] (dd) a heavy chain variable region comprising CDR1, CDR2, and CDR3 regions comprising the amino acid sequences of SEQ ID NOs: 285, 286, and 287, respectively, and/or a light chain variable region comprising CDR1, CDR2, and CDR3 regions comprising the amino acid sequences of SEQ ID NOs: 290, 291, and 292, respectively;
[0041] (ee) a heavy chain variable region comprising CDR1, CDR2, and CDR3 regions comprising the amino acid sequences of SEQ ID NOs: 295, 296, and 297, respectively, and/or a light chain variable region comprising CDR1, CDR2, and CDR3 regions comprising the amino acid sequences of SEQ ID NOs: 300, 301, and 302, respectively;
[0042] (ff) a heavy chain variable region comprising CDR1, CDR2, and CDR3 regions comprising the amino acid sequences of SEQ ID NOs: 305, 306, and 307, respectively, and/or a light chain variable region comprising CDR1, CDR2, and CDR3 regions comprising the amino acid sequences of SEQ ID NOs: 310, 311, and 312, respectively;
[0043] (gg) a heavy chain variable region comprising CDR1, CDR2, and CDR3 regions comprising the amino acid sequences of SEQ ID NOs: 315, 316, and 317, respectively, and/or a light chain variable region comprising CDR1, CDR2, and CDR3 regions comprising the amino acid sequences of SEQ ID NOs: 320, 321, and 322, respectively;
[0044] (hh) a heavy chain variable region comprising CDR1, CDR2, and CDR3 regions comprising the amino acid sequences of SEQ ID NOs: 325, 326, and 327, respectively, and/or a light chain variable region comprising CDR1, CDR2, and CDR3 regions comprising the amino acid sequences of SEQ ID NOs: 330, 331, and 332, respectively;
[0045] (ii) a heavy chain variable region comprising CDR1, CDR2, and CDR3 regions comprising the amino acid sequences of SEQ ID NOs: 335, 336, and 337, respectively, and/or a light chain variable region comprising CDR1, CDR2, and CDR3 regions comprising the amino acid sequences of SEQ ID NOs: 340, 341, and 342, respectively;
[0046] (jj) a heavy chain variable region comprising CDR1, CDR2, and CDR3 regions comprising the amino acid sequences of SEQ ID NOs: 345, 346, and 347, respectively, and/or a light chain variable region comprising CDR1, CDR2, and CDR3 regions comprising the amino acid sequences of SEQ ID NOs: 350, 351, and 352, respectively;
[0047] (kk) a heavy chain variable region comprising CDR1, CDR2, and CDR3 regions comprising the amino acid sequences of SEQ ID NOs: 355, 356, and 357, respectively, and/or a light chain variable region comprising CDR1, CDR2, and CDR3 regions comprising the amino acid sequences of SEQ ID NOs: 360, 361, and 362, respectively;
[0048] (ll) a heavy chain variable region comprising CDR1, CDR2, and CDR3 regions comprising the amino acid sequences of SEQ ID NOs: 365, 366, and 367, respectively, and/or a light chain variable region comprising CDR1, CDR2, and CDR3 regions comprising the amino acid sequences of SEQ ID NOs: 370, 371, and 372, respectively;
[0049] (mm) a heavy chain variable region comprising CDR1, CDR2, and CDR3 regions comprising the amino acid sequences of SEQ ID NOs: 375, 376, and 377, respectively, and/or a light chain variable region comprising CDR1, CDR2, and CDR3 regions comprising the amino acid sequences of SEQ ID NOs: 380, 381, and 382, respectively;
[0050] (nn) a heavy chain variable region comprising CDR1, CDR2, and CDR3 regions comprising the amino acid sequences of SEQ ID NOs: 385, 386, and 387, respectively, and/or a light chain variable region comprising CDR1, CDR2, and CDR3 regions comprising the amino acid sequences of SEQ ID NOs: 390, 391, and 392, respectively;
[0051] (oo) a heavy chain variable region comprising CDR1, CDR2, and CDR3 regions comprising the amino acid sequences of SEQ ID NOs: 395, 396, and 397, respectively, and/or a light chain variable region comprising CDR1, CDR2, and CDR3 regions comprising the amino acid sequences of SEQ ID NOs: 400, 401, and 402, respectively;
[0052] (pp) a heavy chain variable region comprising CDR1, CDR2, and CDR3 regions comprising the amino acid sequences of SEQ ID NOs: 405, 406, and 407, respectively, and/or a light chain variable region comprising CDR1, CDR2, and CDR3 regions comprising the amino acid sequences of SEQ ID NOs: 410, 411, and 412, respectively;
[0053] (qq) a heavy chain variable region comprising CDR1, CDR2, and CDR3 regions comprising the amino acid sequences of SEQ ID NOs: 415, 416, and 417, respectively, and/or a light chain variable region comprising CDR1, CDR2, and CDR3 regions comprising the amino acid sequences of SEQ ID NOs: 420, 421, and 422, respectively;
[0054] (rr) a heavy chain variable region comprising CDR1, CDR2, and CDR3 regions comprising the amino acid sequences of SEQ ID NOs: 425, 426, and 427, respectively, and/or a light chain variable region comprising CDR1, CDR2, and CDR3 regions comprising the amino acid sequences of SEQ ID NOs: 430, 431, and 432, respectively;
[0055] (ss) a heavy chain variable region comprising CDR1, CDR2, and CDR3 regions comprising the amino acid sequences of SEQ ID NOs: 435, 436, and 437, respectively, and/or a light chain variable region comprising CDR1, CDR2, and CDR3 regions comprising the amino acid sequences of SEQ ID NOs: 440, 441, and 442, respectively;
[0056] (tt) a heavy chain variable region comprising CDR1, CDR2, and CDR3 regions comprising the amino acid sequences of SEQ ID NOs: 455, 456, and 457, respectively, and/or a light chain variable region comprising CDR1, CDR2, and CDR3 regions comprising the amino acid sequences of SEQ ID NOs: 460, 461, and 462, respectively;
[0057] (uu) a heavy chain variable region comprising CDR1, CDR2, and CDR3 regions comprising the amino acid sequences of SEQ ID NOs: 465, 466, and 467, respectively, and/or a light chain variable region comprising CDR1, CDR2, and CDR3 regions comprising the amino acid sequences of SEQ ID NOs: 470, 471, and 472, respectively;
[0058] (vv) a heavy chain variable region comprising CDR1, CDR2, and CDR3 regions comprising the amino acid sequences of SEQ ID NOs: 475, 476, and 477, respectively, and/or a light chain variable region comprising CDR1, CDR2, and CDR3 regions comprising the amino acid sequences of SEQ ID NOs: 480, 481, and 482, respectively;
[0059] (ww) a heavy chain variable region comprising CDR1, CDR2, and CDR3 regions comprising the amino acid sequences of SEQ ID NOs: 485, 486, and 487, respectively, and/or a light chain variable region comprising CDR1, CDR2, and CDR3 regions comprising the amino acid sequences of SEQ ID NOs: 490, 491, and 492, respectively;
[0060] (xx) a heavy chain variable region comprising CDR1, CDR2, and CDR3 regions comprising the amino acid sequences of SEQ ID NOs: 495, 496, and 497, respectively, and/or a light chain variable region comprising CDR1, CDR2, and CDR3 regions comprising the amino acid sequences of SEQ ID NOs: 500, 501, and 502, respectively;
[0061] (yy) a heavy chain variable region comprising CDR1, CDR2, and CDR3 regions comprising the amino acid sequences of SEQ ID NOs: 505, 506, and 507, respectively, and/or a light chain variable region comprising CDR1, CDR2, and CDR3 regions comprising the amino acid sequences of SEQ ID NOs: 510, 511, and 512, respectively;
[0062] (zz) a heavy chain variable region comprising CDR1, CDR2, and CDR3 regions comprising the amino acid sequences of SEQ ID NOs: 515, 516, and 517, respectively, and/or a light chain variable region comprising CDR1, CDR2, and CDR3 regions comprising the amino acid sequences of SEQ ID NOs: 520, 521, and 522, respectively;
[0063] (aaa) a heavy chain variable region comprising CDR1, CDR2, and CDR3 regions comprising the amino acid sequences of SEQ ID NOs: 525, 526, and 527, respectively, and/or a light chain variable region comprising CDR1, CDR2, and CDR3 regions comprising the amino acid sequences of SEQ ID NOs: 530, 531, and 532, respectively;
[0064] (bbb) a heavy chain variable region comprising CDR1, CDR2, and CDR3 regions comprising the amino acid sequences of SEQ ID NOs: 535, 536, and 537, respectively, and/or a light chain variable region comprising CDR1, CDR2, and CDR3 regions comprising the amino acid sequences of SEQ ID NOs: 540, 541, and 542, respectively;
[0065] (ccc) a heavy chain variable region comprising CDR1, CDR2, and CDR3 regions comprising the amino acid sequences of SEQ ID NOs: 545, 546, and 547, respectively, and/or a light chain variable region comprising CDR1, CDR2, and CDR3 regions comprising the amino acid sequences of SEQ ID NOs: 550, 551, and 552, respectively;
[0066] (ddd) a heavy chain variable region comprising CDR1, CDR2, and CDR3 regions comprising the amino acid sequences of SEQ ID NOs: 555, 556, and 557, respectively, and/or a light chain variable region comprising CDR1, CDR2, and CDR3 regions comprising the amino acid sequences of SEQ ID NOs: 560, 561, and 562, respectively;
[0067] (eee) a heavy chain variable region comprising CDR1, CDR2, and CDR3 regions comprising the amino acid sequences of SEQ ID NOs: 565, 566, and 567, respectively, and/or a light chain variable region comprising CDR1, CDR2, and CDR3 regions comprising the amino acid sequences of SEQ ID NOs: 570, 571, and 572, respectively;
[0068] (fff) a heavy chain variable region comprising CDR1, CDR2, and CDR3 regions comprising the amino acid sequences of SEQ ID NOs: 43, 44, and 45, respectively;
[0069] (ggg) a heavy chain variable region comprising CDR1, CDR2, and CDR3 regions comprising the amino acid sequences of SEQ ID NOs: 48, 49, and 50, respectively;
[0070] (hhh) a heavy chain variable region comprising CDR1, CDR2, and CDR3 regions comprising the amino acid sequences of SEQ ID NOs: 53, 54, and 55, respectively;
[0071] (iii) a heavy chain variable region comprising CDR1, CDR2, and CDR3 regions comprising the amino acid sequences of SEQ ID NOs: 58, 59, and 60, respectively;
[0072] (jjj) a heavy chain variable region comprising CDR1, CDR2, and CDR3 regions comprising the amino acid sequences of SEQ ID NOs: 63, 64, and 65, respectively;
[0073] (kkk) a heavy chain variable region comprising CDR1, CDR2, and CDR3 regions comprising the amino acid sequences of SEQ ID NOs: 68, 69, and 70, respectively;
[0074] (lll) a heavy chain variable region comprising CDR1, CDR2, and CDR3 regions comprising the amino acid sequences of SEQ ID NOs: 73, 74, and 75, respectively;
[0075] (mmm) a heavy chain variable region comprising CDR1, CDR2, and CDR3 regions comprising the amino acid sequences of SEQ ID NOs: 78, 79, and 80, respectively;
[0076] (nnn) a heavy chain variable region comprising CDR1, CDR2, and CDR3 regions comprising the amino acid sequences of SEQ ID NOs: 83, 84, and 85, respectively;
[0077] (ooo) a heavy chain variable region comprising CDR1, CDR2, and CDR3 regions comprising the amino acid sequences of SEQ ID NOs: 88, 89, and 90, respectively;
[0078] (ppp) a light chain variable region comprising CDR1, CDR2, and CDR3 regions comprising the amino acid sequences of SEQ ID NOs: 8, 9, and 10, respectively;
[0079] (qqq) a light chain variable region comprising CDR1, CDR2, and CDR3 regions comprising the amino acid sequences of SEQ ID NOs: 13, 14, and 15, respectively;
[0080] (rrr) a heavy chain variable region comprising CDR1, CDR2, and CDR3 regions comprising the amino acid sequences of SEQ ID NOs: 18, 19, and 20, respectively;
[0081] (sss) a light chain variable region comprising CDR1, CDR2, and CDR3 regions comprising the amino acid sequences of SEQ ID NOs: 23, 24, and 25, respectively;
[0082] (ttt) a light chain variable region comprising CDR1, CDR2, and CDR3 regions comprising the amino acid sequences of SEQ ID NOs: 28, 29, and 30, respectively;
[0083] (uuu) a heavy chain variable region comprising CDR1, CDR2, and CDR3 regions comprising the amino acid sequences of SEQ ID NOs: 33, 34, and 35, respectively;
[0084] (vvv) a heavy chain variable region comprising CDR1, CDR2, and CDR3 regions comprising the amino acid sequences of SEQ ID NOs: 38, 39, and 40, respectively; or
[0085] (zzz) a heavy chain variable region comprising CDR1, CDR2, and CDR3 regions comprising CDR1, CDR2, and CDR3 amino acid sequences selected from the group of sequences set forth in Table 42, Table 43, and/or Table 45B, respectively, and/or a light chain variable region comprising CDR1, CDR2, and CDR3 regions comprising CDR1, CDR2, and CDR3 amino acid sequences selected from the group of sequences set forth in Table 42, Table 43, and/or Table 45B, respectively. For example, the CDR1, CDR2, and CDR3 regions in the heavy chain variable region and the light chain variable region comprising CDR1, CDR2, and CDR3 amino acid sequences selected from the group of sequences set forth in SEQ ID NOs: 1565-2212.

[0086] In various embodiments, the antibody or antigen binding fragment thereof comprises a heavy chain variable region comprising CDR1, CDR2, and CDR3 regions comprising the amino acid sequences of SEQ ID NOs: 1292, 1293, and 1294, respectively, and/or a light chain variable region comprising CDR1, CDR2, and CDR3 regions comprising the amino acid sequences of SEQ ID NOs: 1297, 1298, and 1299, respectively.

[0087] In various embodiments, the antibody or antigen binding fragment thereof comprises a heavy chain variable region comprising CDR1, CDR2, and CDR3 regions comprising the amino acid sequences of SEQ ID NOs: 1302, 1303, and 1304, respectively, and/or a light chain variable region comprising CDR1, CDR2, and CDR3 regions comprising the amino acid sequences of SEQ ID NOs: 1307, 1308, and 1309, respectively.

[0088] In various embodiments, the antibody or antigen binding fragment thereof comprises a heavy chain variable region comprising CDR1, CDR2, and CDR3 regions comprising the amino acid sequences of SEQ ID NOs: 1312, 1313, and 1314, respectively, and/or a light chain variable region comprising CDR1, CDR2, and CDR3 regions comprising the amino acid sequences of SEQ ID NOs: 1317, 1318, and 1319, respectively.

[0089] In various embodiments, the antibody or antigen binding fragment thereof comprises a heavy chain variable region comprising CDR1, CDR2, and CDR3 regions comprising the amino acid sequences of SEQ ID NOs: 1322, 1323, and 1324, respectively, and/or a light chain variable region comprising CDR1, CDR2, and CDR3 regions comprising the amino acid sequences of SEQ ID NOs: 1327, 1328, and 1329, respectively.

[0090] In various embodiments, the antibody or antigen binding fragment thereof comprises a heavy chain variable region comprising CDR1, CDR2, and CDR3 regions comprising the amino acid sequences of SEQ ID NOs: 1332, 1333, and 1334, respectively, and/or a light chain variable region comprising CDR1, CDR2, and CDR3 regions comprising the amino acid sequences of SEQ ID NOs: 1337, 1338, and 1339, respectively.

[0091] In various embodiments, the antibody or antigen binding fragment thereof comprises a heavy chain variable region comprising CDR1, CDR2, and CDR3 regions comprising the amino acid sequences of SEQ ID NOs: 1342, 1343, and 1344, and/or a light chain variable region comprising CDR1, CDR2, and CDR3 regions comprising the amino acid sequences of SEQ ID NOs: 1347, 1348, and 1349, respectively.

[0092] In various embodiments, the antibody or antigen binding fragment thereof comprises a heavy chain variable region comprising CDR1, CDR2, and CDR3 regions comprising the amino acid sequences of SEQ ID NOs: 1352, 1353, and 1354, respectively, and/or a light chain variable region comprising CDR1, CDR2, and CDR3 regions comprising the amino acid sequences of SEQ ID NOs: 1357, 1358, and 1359, respectively.

[0093] In various embodiments, the antibody or antigen binding fragment thereof comprises a heavy chain variable region comprising CDR1, CDR2, and CDR3 regions comprising the amino acid sequences of SEQ ID NOs: 1362, 1363, and 1364, respectively, and/or a light chain variable region comprising CDR1, CDR2, and CDR3 regions comprising the amino acid sequences of SEQ ID NOs: 1367, 1368, and 1369, respectively.

[0094] In various embodiments, the antibody or antigen binding fragment thereof comprises a heavy chain variable region comprising CDR1, CDR2, and CDR3 regions comprising the amino acid sequences of SEQ ID NOs: 1372, 1373, and 1374, respectively, and/or a light chain variable region comprising CDR1, CDR2, and CDR3 regions comprising the amino acid sequences of SEQ ID NOs: 1377, 1378, and 1379, respectively.

[0095] In various embodiments, the antibody or antigen binding fragment thereof comprises a heavy chain variable region comprising CDR1, CDR2, and CDR3 regions comprising the amino acid sequences of SEQ ID NOs: 1382, 1383, and 1384, respectively, and/or a light chain variable region comprising CDR1, CDR2, and CDR3 regions comprising the amino acid sequences of SEQ ID NOs: 1387, 1388, and 1389, respectively.

[0096] In various embodiments, the antibody or antigen binding fragment thereof comprises a heavy chain variable region comprising CDR1, CDR2, and CDR3 regions comprising the amino acid sequences of SEQ ID NOs: 1392, 1393, and 1394, respectively, and/or a light chain variable region comprising CDR1, CDR2, and CDR3 regions comprising the amino acid sequences of SEQ ID NOs: 1397, 1398, and 1399, respectively.

[0097] In various embodiments, the antibody or antigen binding fragment thereof comprises a heavy chain variable region comprising CDR1, CDR2, and CDR3 regions comprising the amino acid sequences of SEQ ID NOs: 1402, 1403, and 1404, respectively, and/or a light chain variable region comprising CDR1, CDR2, and CDR3 regions comprising the amino acid sequences of SEQ ID NOs: 1407, 1408, and 1409, respectively.

[0098] In various embodiments, the antibody or antigen binding fragment thereof comprises a heavy chain variable region comprising CDR1, CDR2, and CDR3 regions comprising the amino acid sequences of SEQ ID NOs: 1412, 1413, and 1414, respectively, and/or a light chain variable region comprising CDR1, CDR2, and CDR3 regions comprising the amino acid sequences of SEQ ID NOs: 1417, 1418, and 1419, respectively.

[0099] In various embodiments, the antibody or antigen binding fragment thereof comprises a heavy chain variable region comprising CDR1, CDR2, and CDR3 regions comprising the amino acid sequences of SEQ ID NOs: 1422, 1423, and 1424, respectively, and/or a light chain variable region comprising CDR1, CDR2, and CDR3 regions comprising the amino acid sequences of SEQ ID NOs: 1427, 1428, and 1429, respectively.

[0100] In various embodiments, the antibody or antigen binding fragment thereof comprises a heavy chain variable region comprising CDR1, CDR2, and CDR3 regions comprising the amino acid sequences of SEQ ID NOs: 1432, 1433, and 1434, respectively, and/or a light chain variable region comprising CDR1, CDR2, and CDR3 regions comprising the amino acid sequences of SEQ ID NOs: 1437, 1438, and 1439, respectively.

[0101] In various embodiments, the antibody or antigen binding fragment thereof comprises a heavy chain variable region comprising CDR1, CDR2, and CDR3 regions comprising the amino acid sequences of SEQ ID NOs: 1442, 1443, and 1444, and/or a light chain variable region comprising CDR1, CDR2, and CDR3 regions comprising the amino acid sequences of SEQ ID NOs: 1447, 1448, and 1449, respectively.

[0102] In various embodiments, the antibody or antigen binding fragment thereof comprises a heavy chain variable region comprising CDR1, CDR2, and CDR3 regions comprising the amino acid sequences of SEQ ID NOs: 1452, 1453, and 1454, respectively, and/or a light chain variable region comprising CDR1, CDR2, and CDR3 regions comprising the amino acid sequences of SEQ ID NOs: 1457, 1458, and 1459, respectively.

[0103] In various embodiments, the antibody or antigen binding fragment thereof comprises a heavy chain variable region comprising CDR1, CDR2, and CDR3 regions comprising the amino acid sequences of SEQ ID NOs: 1462, 1463, and 1464, respectively, and/or a light chain variable region comprising CDR1, CDR2, and CDR3 regions comprising the amino acid sequences of SEQ ID NOs: 1467, 1468, and 1469, respectively.

[0104] In various embodiments, the antibody or antigen binding fragment thereof comprises a heavy chain variable region comprising CDR1, CDR2, and CDR3 regions comprising the amino acid sequences of SEQ ID NOs: 1472, 1473, and 1474, respectively, and/or a light chain variable region comprising CDR1, CDR2, and CDR3 regions comprising the amino acid sequences of SEQ ID NOs: 1477, 1478, and 1479, respectively.

[0105] In various embodiments, the antibody or antigen binding fragment thereof comprises a heavy chain variable region comprising CDR1, CDR2, and CDR3 regions comprising the amino acid sequences of SEQ ID NOs: 1482, 1483, and 1484, respectively, and/or a light chain variable region comprising CDR1, CDR2, and CDR3 regions comprising the amino acid sequences of SEQ ID NOs: 1487, 1488, and 1489, respectively.

[0106] In various embodiments, the antibody or antigen binding fragment thereof comprises a heavy chain variable region comprising CDR1, CDR2, and CDR3 regions comprising the amino acid sequences of SEQ ID NOs: 1492, 1493, and 1494, respectively, and/or a light chain variable region comprising CDR1, CDR2, and CDR3 regions comprising the amino acid sequences of SEQ ID NOs: 1497, 1498, and 1499, respectively.

[0107] In various embodiments, the antibody or antigen binding fragment thereof comprises a heavy chain variable region comprising CDR1, CDR2, and CDR3 regions comprising the amino acid sequences of SEQ ID NOs: 1502, 1503, and 1504, respectively, and/or a light chain variable region comprising CDR1, CDR2, and CDR3 regions comprising the amino acid sequences of SEQ ID NOs: 1507, 1508, and 1509, respectively.

[0108] In various embodiments, the antibody or antigen binding fragment thereof comprises a heavy chain variable region comprising CDR1, CDR2, and CDR3 regions comprising the amino acid sequences of SEQ ID NOs: 1512, 1513, and 1514, respectively, and/or a light chain variable region comprising CDR1, CDR2, and CDR3 regions comprising the amino acid sequences of SEQ ID NOs: 1517, 1518, and 1519, respectively.

[0109] In various embodiments, the antibody or antigen binding fragment thereof comprises a heavy chain variable region comprising CDR1, CDR2, and CDR3 regions comprising the amino acid sequences of SEQ ID NOs: 1522, 1523, and 1524, respectively, and/or a light chain variable region comprising CDR1, CDR2, and CDR3 regions comprising the amino acid sequences of SEQ ID NOs: 1527, 1528, and 1529, respectively.

[0110] In various embodiments, the antibody or antigen binding fragment thereof comprises a heavy chain variable region comprising CDR1, CDR2, and CDR3 regions comprising the amino acid sequences of SEQ ID NOs: 1532, 1533, and 1534, respectively, and/or a light chain variable region comprising CDR1, CDR2, and CDR3 regions comprising the amino acid sequences of SEQ ID NOs: 1537, 1538, and 1539, respectively.

[0111] In various embodiments, the antibody or antigen binding fragment thereof comprises a heavy chain variable region comprising CDR1, CDR2, and CDR3 regions comprising the amino acid sequences of SEQ ID NOs: 1542, 1543, and 1544, and/or a light chain variable region comprising CDR1, CDR2, and CDR3 regions comprising the amino acid sequences of SEQ ID NOs: 1547, 1548, and 1549, respectively.

[0112] In various embodiments, the antibody or antigen binding fragment thereof comprises a heavy chain variable region comprising CDR1, CDR2, and CDR3 regions comprising the amino acid sequences of SEQ ID NOs: 1552, 1553, and 1554, respectively, and/or a light chain variable region comprising CDR1, CDR2, and CDR3 regions comprising the amino acid sequences of SEQ ID NOs: 1557, 1558, and 1559, respectively.

[0113] In various embodiments, the antibody or antigen binding fragment thereof comprises a heavy chain variable region comprising CDR1, CDR2, and CDR3 regions comprising the amino acid sequences of SEQ ID NOs: 1565, 1566, and 1567, respectively, and/or a light chain variable region comprising CDR1, CDR2, and CDR3 regions comprising the amino acid sequences of SEQ ID NOs: 1568, 1569, and 1570, respectively.

[0114] In various embodiments, the antibody or antigen binding fragment thereof comprises a heavy chain variable region comprising CDR1, CDR2, and CDR3 regions comprising the amino acid sequences of SEQ ID NOs: 1571, 1572, and 1573, respectively, and/or a light chain variable region comprising CDR1, CDR2, and CDR3 regions comprising the amino acid sequences of SEQ ID NOs: 1574, 1575, and 1576, respectively.

[0115] In various embodiments, the antibody or antigen binding fragment thereof comprises a heavy chain variable region comprising CDR1, CDR2, and CDR3 regions comprising the amino acid sequences of SEQ ID NOs: 1577, 1578, and 1579, respectively, and/or a light chain variable region comprising CDR1, CDR2, and CDR3 regions comprising the amino acid sequences of SEQ ID NOs: 1580, 1581, and 1582, respectively.

[0116] In various embodiments, the antibody or antigen binding fragment thereof comprises a heavy chain variable region comprising CDR1, CDR2, and CDR3 regions comprising the amino acid sequences of SEQ ID NOs: 1583, 1584, and 1585, respectively, and/or a light chain variable region comprising CDR1, CDR2, and CDR3 regions comprising the amino acid sequences of SEQ ID NOs: 1586, 1587, and 1588, respectively.

[0117] In various embodiments, the antibody or antigen binding fragment thereof comprises a heavy chain variable region comprising CDR1, CDR2, and CDR3 regions comprising the amino acid sequences of SEQ ID NOs: 1589, 1590, and 1591, respectively, and/or a light chain variable region comprising CDR1, CDR2, and CDR3 regions comprising the amino acid sequences of SEQ ID NOs: 1592, 1593, and 1594, respectively.

[0118] In various embodiments, the antibody or antigen binding fragment thereof comprises a heavy chain variable region comprising CDR1, CDR2, and CDR3 regions comprising the amino acid sequences of SEQ ID NOs: 1595, 1596, and 1597, respectively, and/or a light chain variable region comprising CDR1, CDR2, and CDR3 regions comprising the amino acid sequences of SEQ ID NOs: 1598, 1599, and 1600, respectively.

[0119] In various embodiments, the antibody or antigen binding fragment thereof comprises a heavy chain variable region comprising CDR1, CDR2, and CDR3 regions comprising the amino acid sequences of SEQ ID NOs: 1601, 1602, and 1603, respectively, and/or a light chain variable region comprising CDR1, CDR2, and CDR3 regions comprising the amino acid sequences of SEQ ID NOs: 1604, 1605, and 1606, respectively.

[0120] In various embodiments, the antibody or antigen binding fragment thereof comprises a heavy chain variable region comprising CDR1, CDR2, and CDR3 regions comprising the amino acid sequences of SEQ ID NOs: 1607, 1608, and 1609, respectively, and/or a light chain variable region comprising CDR1, CDR2, and CDR3 regions comprising the amino acid sequences of SEQ ID NOs: 1610, 1611, and 1612, respectively.

[0121] In various embodiments, the antibody or antigen binding fragment thereof comprises a heavy chain variable region comprising CDR1, CDR2, and CDR3 regions comprising the amino acid sequences of SEQ ID NOs: 1613, 1614, and 1615, respectively, and/or a light chain variable region comprising CDR1, CDR2, and CDR3 regions comprising the amino acid sequences of SEQ ID NOs: 1616, 1617, and 1618, respectively.

[0122] In various embodiments, the antibody or antigen binding fragment thereof comprises a heavy chain variable region comprising CDR1, CDR2, and CDR3 regions comprising the amino acid sequences of SEQ ID NOs: 1619, 1620, and 1621, respectively, and/or a light chain variable region comprising CDR1, CDR2, and CDR3 regions comprising the amino acid sequences of SEQ ID NOs: 1622, 1623, and 1624, respectively.

[0123] In various embodiments, the antibody or antigen binding fragment thereof comprises a heavy chain variable region comprising CDR1, CDR2, and CDR3 regions comprising the amino acid sequences of SEQ ID NOs: 1625, 1626, and 1627, respectively, and/or a light chain variable region comprising CDR1, CDR2, and CDR3 regions comprising the amino acid sequences of SEQ ID NOs: 1628, 1629, and 1630, respectively.

[0124] In various embodiments, the antibody or antigen binding fragment thereof comprises a heavy chain variable region comprising CDR1, CDR2, and CDR3 regions comprising the amino acid sequences of SEQ ID NOs: 1631, 1632, and 1633, respectively, and/or a light chain variable region comprising CDR1, CDR2, and CDR3 regions comprising the amino acid sequences of SEQ ID NOs: 1634, 1635, and 1636, respectively.

[0125] In various embodiments, the antibody or antigen binding fragment thereof comprises a heavy chain variable region comprising CDR1, CDR2, and CDR3 regions comprising the amino acid sequences of SEQ ID NOs: 1637, 1638, and 1639, respectively, and/or a light chain variable region comprising CDR1, CDR2, and CDR3 regions comprising the amino acid sequences of SEQ ID NOs: 1640, 1641, and 1642, respectively.

[0126] In various embodiments, the antibody or antigen binding fragment thereof comprises a heavy chain variable region comprising CDR1, CDR2, and CDR3 regions comprising the amino acid sequences of SEQ ID NOs: 1643, 1644, and 1645, respectively, and/or a light chain variable region comprising CDR1, CDR2, and CDR3 regions comprising the amino acid sequences of SEQ ID NOs: 1646, 1647, and 1648, respectively.

[0127] In various embodiments, the antibody or antigen binding fragment thereof comprises a heavy chain variable region comprising CDR1, CDR2, and CDR3 regions comprising the amino acid sequences of SEQ ID NOs: 1649, 1650, and 1651, respectively, and/or a light chain variable region comprising CDR1, CDR2, and CDR3 regions comprising the amino acid sequences of SEQ ID NOs: 1652, 1653, and 1654, respectively.

[0128] In various embodiments, the antibody or antigen binding fragment thereof comprises a heavy chain variable region comprising CDR1, CDR2, and CDR3 regions comprising the amino acid sequences of SEQ ID NOs: 1655, 1656, and 1657, respectively, and/or a light chain variable region comprising CDR1, CDR2, and CDR3 regions comprising the amino acid sequences of SEQ ID NOs: 1658, 1659, and 1660, respectively.

[0129] In various embodiments, the antibody or antigen binding fragment thereof comprises a heavy chain variable region comprising CDR1, CDR2, and CDR3 regions comprising the amino acid sequences of SEQ ID NOs: 1661, 1662, and 1663, respectively, and/or a light chain variable region comprising CDR1, CDR2, and CDR3 regions comprising the amino acid sequences of SEQ ID NOs: 1664, 1665, and 1666, respectively.

[0130] In various embodiments, the antibody or antigen binding fragment thereof comprises a heavy chain variable region comprising CDR1, CDR2, and CDR3 regions comprising the amino acid sequences of SEQ ID NOs: 1667, 1668, and 1669, respectively, and/or a light chain variable region comprising CDR1, CDR2, and CDR3 regions comprising the amino acid sequences of SEQ ID NOs: 1670, 1671, and 1672, respectively.

[0131] In various embodiments, the antibody or antigen binding fragment thereof comprises a heavy chain variable region comprising CDR1, CDR2, and CDR3 regions comprising the amino acid sequences of SEQ ID NOs: 1673, 1674, and 1675, respectively, and/or a light chain variable region comprising CDR1, CDR2, and CDR3 regions comprising the amino acid sequences of SEQ ID NOs: 1676, 1677, and 1678, respectively.

[0132] In various embodiments, the antibody or antigen binding fragment thereof comprises a heavy chain variable region comprising CDR1, CDR2, and CDR3 regions comprising the amino acid sequences of SEQ ID NOs: 1679, 1680, and 1681, respectively, and/or a light chain variable region comprising CDR1, CDR2, and CDR3 regions comprising the amino acid sequences of SEQ ID NOs: 1682, 1683, and 1684, respectively.

[0133] In various embodiments, the antibody or antigen binding fragment thereof comprises a heavy chain variable region comprising CDR1, CDR2, and CDR3 regions comprising the amino acid sequences of SEQ ID NOs: 1685, 1686, and 1687, respectively, and/or a light chain variable region comprising CDR1, CDR2, and CDR3 regions comprising the amino acid sequences of SEQ ID NOs: 1688, 1689, and 1690, respectively.

[0134] In various embodiments, the antibody or antigen binding fragment thereof comprises a heavy chain variable region comprising CDR1, CDR2, and CDR3 regions comprising the amino acid sequences of SEQ ID NOs: 1691, 1692, and 1693, respectively, and/or a light chain variable region comprising CDR1, CDR2, and CDR3 regions comprising the amino acid sequences of SEQ ID NOs: 1694, 1695, and 1696, respectively.

[0135] In various embodiments, the antibody or antigen binding fragment thereof comprises a heavy chain variable region comprising CDR1, CDR2, and CDR3 regions comprising the amino acid sequences of SEQ ID NOs: 1697, 1698, and 1699, respectively, and/or a light chain variable region comprising CDR1, CDR2, and CDR3 regions comprising the amino acid sequences of SEQ ID NOs: 1700, 1701, and 1702, respectively.

[0136] In various embodiments, the antibody or antigen binding fragment thereof comprises a heavy chain variable region comprising CDR1, CDR2, and CDR3 regions comprising the amino acid sequences of SEQ ID NOs: 1703, 1704, and 1705, respectively, and/or a light chain variable region comprising CDR1, CDR2, and CDR3 regions comprising the amino acid sequences of SEQ ID NOs: 1706, 1707, and 1708, respectively.

[0137] In various embodiments, the antibody or antigen binding fragment thereof comprises a heavy chain variable region comprising CDR1, CDR2, and CDR3 regions comprising the amino acid sequences of SEQ ID NOs: 1709, 1710, and 1711, respectively, and/or a light chain variable region comprising CDR1, CDR2, and CDR3 regions comprising the amino acid sequences of SEQ ID NOs: 1712, 1713, and 1714, respectively.

[0138] In various embodiments, the antibody or antigen binding fragment thereof comprises a heavy chain variable region comprising CDR1, CDR2, and CDR3 regions comprising the amino acid sequences of SEQ ID NOs: 1715, 1716, and 1717, respectively, and/or a light chain variable region comprising CDR1, CDR2, and CDR3 regions comprising the amino acid sequences of SEQ ID NOs: 1718, 1719, and 1720, respectively.

[0139] In various embodiments, the antibody or antigen binding fragment thereof comprises a heavy chain variable region comprising CDR1, CDR2, and CDR3 regions comprising the amino acid sequences of SEQ ID NOs: 1721, 1722, and 1723, respectively, and/or a light chain variable region comprising CDR1, CDR2, and CDR3 regions comprising the amino acid sequences of SEQ ID NOs: 1724, 1725, and 1726, respectively.

[0140] In various embodiments, the antibody or antigen binding fragment thereof comprises a heavy chain variable region comprising CDR1, CDR2, and CDR3 regions comprising the amino acid sequences of SEQ ID NOs: 1727, 1728, and 1729, respectively, and/or a light chain variable region comprising CDR1, CDR2, and CDR3 regions comprising the amino acid sequences of SEQ ID NOs: 1730, 1731, and 1732, respectively.

[0141] In various embodiments, the antibody or antigen binding fragment thereof comprises a heavy chain variable region comprising CDR1, CDR2, and CDR3 regions comprising the amino acid sequences of SEQ ID NOs: 1733, 1734, and 1735, respectively, and/or a light chain variable region comprising CDR1, CDR2, and CDR3 regions comprising the amino acid sequences of SEQ ID NOs: 1736, 1737, and 1738, respectively.

[0142] In various embodiments, the antibody or antigen binding fragment thereof comprises a heavy chain variable region comprising CDR1, CDR2, and CDR3 regions comprising the amino acid sequences of SEQ ID NOs: 1739, 1740, and 1741, respectively, and/or a light chain variable region comprising CDR1, CDR2, and CDR3 regions comprising the amino acid sequences of SEQ ID NOs: 1742, 1743, and 1744, respectively.

[0143] In various embodiments, the antibody or antigen binding fragment thereof comprises a heavy chain variable region comprising CDR1, CDR2, and CDR3 regions comprising the amino acid sequences of SEQ ID NOs: 1745, 1746, and 1747, respectively, and/or a light chain variable region comprising CDR1, CDR2, and CDR3 regions comprising the amino acid sequences of SEQ ID NOs: 1748, 1749, and 1750, respectively.

[0144] In various embodiments, the antibody or antigen binding fragment thereof comprises a heavy chain variable region comprising CDR1, CDR2, and CDR3 regions comprising the amino acid sequences of SEQ ID NOs: 1751, 1752, and 1753, respectively, and/or a light chain variable region comprising CDR1, CDR2, and CDR3 regions comprising the amino acid sequences of SEQ ID NOs: 1754, 1755, and 1756, respectively.

[0145] In various embodiments, the antibody or antigen binding fragment thereof comprises a heavy chain variable region comprising CDR1, CDR2, and CDR3 regions comprising the amino acid sequences of SEQ ID NOs: 1757, 1758, and 1759, respectively, and/or a light chain variable region comprising CDR1, CDR2, and CDR3 regions comprising the amino acid sequences of SEQ ID NOs: 1760, 1761, and 1762, respectively.

[0146] In various embodiments, the antibody or antigen binding fragment thereof comprises a heavy chain variable region comprising CDR1, CDR2, and CDR3 regions comprising the amino acid sequences of SEQ ID NOs: 1763, 1764, and 1765, respectively, and/or a light chain variable region comprising CDR1, CDR2, and CDR3 regions comprising the amino acid sequences of SEQ ID NOs: 1766, 1767, and 1768, respectively.

[0147] In various embodiments, the antibody or antigen binding fragment thereof comprises a heavy chain variable region comprising CDR1, CDR2, and CDR3 regions comprising the amino acid sequences of SEQ ID NOs: 1769, 1770, and 1771, respectively, and/or a light chain variable region comprising CDR1, CDR2, and CDR3 regions comprising the amino acid sequences of SEQ ID NOs: 1772, 1773, and 1774, respectively.

[0148] In various embodiments, the antibody or antigen binding fragment thereof comprises a heavy chain variable region comprising CDR1, CDR2, and CDR3 regions comprising the amino acid sequences of SEQ ID NOs: 1775, 1776, and 1777, respectively, and/or a light chain variable region comprising CDR1, CDR2, and CDR3 regions comprising the amino acid sequences of SEQ ID NOs: 1778, 1779, and 1780, respectively.

[0149] In various embodiments, the antibody or antigen binding fragment thereof comprises a heavy chain variable region comprising CDR1, CDR2, and CDR3 regions comprising the amino acid sequences of SEQ ID NOs: 1781, 1782, and 1783, respectively, and/or a light chain variable region comprising CDR1, CDR2, and CDR3 regions comprising the amino acid sequences of SEQ ID NOs: 1784, 1785, and 1786, respectively.

[0150] In various embodiments, the antibody or antigen binding fragment thereof comprises a heavy chain variable region comprising CDR1, CDR2, and CDR3 regions comprising the amino acid sequences of SEQ ID NOs: 1787, 1788, and 1789, respectively, and/or a light chain variable region comprising CDR1, CDR2, and CDR3 regions comprising the amino acid sequences of SEQ ID NOs: 1790, 1791, and 1792, respectively.

[0151] In various embodiments, the antibody or antigen binding fragment thereof comprises a heavy chain variable region comprising CDR1, CDR2, and CDR3 regions comprising the amino acid sequences of SEQ ID NOs: 1793, 1794, and 1795, respectively, and/or a light chain variable region comprising CDR1, CDR2, and CDR3 regions comprising the amino acid sequences of SEQ ID NOs: 1796, 1797, and 1798, respectively.

[0152] In various embodiments, the antibody or antigen binding fragment thereof comprises a heavy chain variable region comprising CDR1, CDR2, and CDR3 regions comprising the amino acid sequences of SEQ ID NOs: 1799, 1800, and 1801, respectively, and/or a light chain variable region comprising CDR1, CDR2, and CDR3 regions comprising the amino acid sequences of SEQ ID NOs: 1802, 1803, and 1804, respectively.

[0153] In various embodiments, the antibody or antigen binding fragment thereof comprises a heavy chain variable region comprising CDR1, CDR2, and CDR3 regions comprising the amino acid sequences of SEQ ID NOs: 1805, 1806, and 1807, respectively, and/or a light chain variable region comprising CDR1, CDR2, and CDR3 regions comprising the amino acid sequences of SEQ ID NOs: 1808, 1809, and 1810, respectively.

[0154] In various embodiments, the antibody or antigen binding fragment thereof comprises a heavy chain variable region comprising CDR1, CDR2, and CDR3 regions comprising the amino acid sequences of SEQ ID NOs: 1811, 1812, and 1813, respectively, and/or a light chain variable region comprising CDR1, CDR2, and CDR3 regions comprising the amino acid sequences of SEQ ID NOs: 1814, 1815, and 1816, respectively.

[0155] In various embodiments, the antibody or antigen binding fragment thereof comprises a heavy chain variable region comprising CDR1, CDR2, and CDR3 regions comprising the amino acid sequences of SEQ ID NOs: 1817, 1818, and 1819, respectively, and/or a light chain variable region comprising CDR1, CDR2, and CDR3 regions comprising the amino acid sequences of SEQ ID NOs: 1820, 1821, and 1822, respectively.

[0156] In various embodiments, the antibody or antigen binding fragment thereof comprises a heavy chain variable region comprising CDR1, CDR2, and CDR3 regions comprising the amino acid sequences of SEQ ID NOs: 1823, 1824, and 1825, respectively, and/or a light chain variable region comprising CDR1, CDR2, and CDR3 regions comprising the amino acid sequences of SEQ ID NOs: 1826, 1827, and 1828, respectively.

[0157] In various embodiments, the antibody or antigen binding fragment thereof comprises a heavy chain variable region comprising CDR1, CDR2, and CDR3 regions comprising the amino acid sequences of SEQ ID NOs: 1829, 1830, and 1831, respectively, and/or a light chain variable region comprising CDR1, CDR2, and CDR3 regions comprising the amino acid sequences of SEQ ID NOs: 1832, 1833, and 1834, respectively.

[0158] In various embodiments, the antibody or antigen binding fragment thereof comprises a heavy chain variable region comprising CDR1, CDR2, and CDR3 regions comprising the amino acid sequences of SEQ ID NOs: 1835, 1836, and 1837, respectively, and/or a light chain variable region comprising CDR1, CDR2, and CDR3 regions comprising the amino acid sequences of SEQ ID NOs: 1838, 1839, and 1840, respectively.

[0159] In various embodiments, the antibody or antigen binding fragment thereof comprises a heavy chain variable region comprising CDR1, CDR2, and CDR3 regions comprising the amino acid sequences of SEQ ID NOs: 1841, 1842, and 1843, respectively, and/or a light chain variable region comprising CDR1, CDR2, and CDR3 regions comprising the amino acid sequences of SEQ ID NOs: 1844, 1845, and 1846, respectively.

[0160] In various embodiments, the antibody or antigen binding fragment thereof comprises a heavy chain variable region comprising CDR1, CDR2, and CDR3 regions comprising the amino acid sequences of SEQ ID NOs: 1847, 1848, and 1849, respectively, and/or a light chain variable region comprising CDR1, CDR2, and CDR3 regions comprising the amino acid sequences of SEQ ID NOs: 1850, 1851, and 1852, respectively.

[0161] In various embodiments, the antibody or antigen binding fragment thereof comprises a heavy chain variable region comprising CDR1, CDR2, and CDR3 regions comprising the amino acid sequences of SEQ ID NOs: 1853, 1854, and 1855, respectively, and/or a light chain variable region comprising CDR1, CDR2, and CDR3 regions comprising the amino acid sequences of SEQ ID NOs: 1856, 1857, and 1858, respectively.

[0162] In various embodiments, the antibody or antigen binding fragment thereof comprises a heavy chain variable region comprising CDR1, CDR2, and CDR3 regions comprising the amino acid sequences of SEQ ID NOs: 1859, 1860, and 1861, respectively, and/or a light chain variable region comprising CDR1, CDR2, and CDR3 regions comprising the amino acid sequences of SEQ ID NOs: 1862, 1863, and 1864, respectively.

[0163] In various embodiments, the antibody or antigen binding fragment thereof comprises a heavy chain variable region comprising CDR1, CDR2, and CDR3 regions comprising the amino acid sequences of SEQ ID NOs: 1865, 1866, and 1867, respectively, and/or a light chain variable region comprising CDR1, CDR2, and CDR3 regions comprising the amino acid sequences of SEQ ID NOs: 1868, 1869, and 1870, respectively.

[0164] In various embodiments, the antibody or antigen binding fragment thereof comprises a heavy chain variable region comprising CDR1, CDR2, and CDR3 regions comprising the amino acid sequences of SEQ ID NOs: 1871, 1872, and 1873, respectively, and/or a light chain variable region comprising CDR1, CDR2, and CDR3 regions comprising the amino acid sequences of SEQ ID NOs: 1874, 1875, and 1876, respectively.

[0165] In various embodiments, the antibody or antigen binding fragment thereof comprises a heavy chain variable region comprising CDR1, CDR2, and CDR3 regions comprising the amino acid sequences of SEQ ID NOs: 1877, 1878, and 1879, respectively, and/or a light chain variable region comprising CDR1, CDR2, and CDR3 regions comprising the amino acid sequences of SEQ ID NOs: 1880, 1881, and 1882, respectively.

[0166] In various embodiments, the antibody or antigen binding fragment thereof comprises a heavy chain variable region comprising CDR1, CDR2, and CDR3 regions comprising the amino acid sequences of SEQ ID NOs: 1883, 1884, and 1885, respectively, and/or a light chain variable region comprising CDR1, CDR2, and CDR3 regions comprising the amino acid sequences of SEQ ID NOs: 1886, 1887, and 1888, respectively.

[0167] In various embodiments, the antibody or antigen binding fragment thereof comprises a heavy chain variable region comprising CDR1, CDR2, and CDR3 regions comprising the amino acid sequences of SEQ ID NOs: 1889, 1890, and 1891, respectively, and/or a light chain variable region comprising CDR1, CDR2, and CDR3 regions comprising the amino acid sequences of SEQ ID NOs: 1892, 1893, and 1894, respectively.

[0168] In various embodiments, the antibody or antigen binding fragment thereof comprises a heavy chain variable region comprising CDR1, CDR2, and CDR3 regions comprising the amino acid sequences of SEQ ID NOs: 1895, 1896, and 1897, respectively, and/or a light chain variable region comprising CDR1, CDR2, and CDR3 regions comprising the amino acid sequences of SEQ ID NOs: 1898, 1899, and 1900, respectively.

[0169] In various embodiments, the antibody or antigen binding fragment thereof comprises a heavy chain variable region comprising CDR1, CDR2, and CDR3 regions comprising the amino acid sequences of SEQ ID NOs: 1901, 1902, and 1903, respectively, and/or a light chain variable region comprising CDR1, CDR2, and CDR3 regions comprising the amino acid sequences of SEQ ID NOs: 1904, 1905, and 1906, respectively.

[0170] In various embodiments, the antibody or antigen binding fragment thereof comprises a heavy chain variable region comprising CDR1, CDR2, and CDR3 regions comprising the amino acid sequences of SEQ ID NOs: 1907, 1908, and 1909, respectively, and/or a light chain variable region comprising CDR1, CDR2, and CDR3 regions comprising the amino acid sequences of SEQ ID NOs: 1910, 1911, and 1912, respectively.

[0171] In various embodiments, the antibody or antigen binding fragment thereof comprises a heavy chain variable region comprising CDR1, CDR2, and CDR3 regions comprising the amino acid sequences of SEQ ID NOs: 1913, 1914, and 1915, respectively, and/or a light chain variable region comprising CDR1, CDR2, and CDR3 regions comprising the amino acid sequences of SEQ ID NOs: 1916, 1917, and 1918, respectively.

[0172] In various embodiments, the antibody or antigen binding fragment thereof comprises a heavy chain variable region comprising CDR1, CDR2, and CDR3 regions comprising the amino acid sequences of SEQ ID NOs: 1919, 1920, and 1921, respectively, and/or a light chain variable region comprising CDR1, CDR2, and CDR3 regions comprising the amino acid sequences of SEQ ID NOs: 1922, 1923, and 1924, respectively.

[0173] In various embodiments, the antibody or antigen binding fragment thereof comprises a heavy chain variable region comprising CDR1, CDR2, and CDR3 regions comprising the amino acid sequences of SEQ ID NOs: 1925, 1926, and 1927, respectively, and/or a light chain variable region comprising CDR1, CDR2, and CDR3 regions comprising the amino acid sequences of SEQ ID NOs: 1928, 1929, and 1930, respectively.

[0174] In various embodiments, the antibody or antigen binding fragment thereof comprises a heavy chain variable region comprising CDR1, CDR2, and CDR3 regions comprising the amino acid sequences of SEQ ID NOs: 1931, 1932, and 1933, respectively, and/or a light chain variable region comprising CDR1, CDR2, and CDR3 regions comprising the amino acid sequences of SEQ ID NOs: 1934, 1935, and 1936, respectively.

[0175] In various embodiments, the antibody or antigen binding fragment thereof comprises a heavy chain variable region comprising CDR1, CDR2, and CDR3 regions comprising the amino acid sequences of SEQ ID NOs: 1937, 1938, and 1939, respectively, and/or a light chain variable region comprising CDR1, CDR2, and CDR3 regions comprising the amino acid sequences of SEQ ID NOs: 1940, 1941, and 1942, respectively.

[0176] In various embodiments, the antibody or antigen binding fragment thereof comprises a heavy chain variable region comprising CDR1, CDR2, and CDR3 regions comprising the amino acid sequences of SEQ ID NOs: 1943, 1944, and 1945, respectively, and/or a light chain variable region comprising CDR1, CDR2, and CDR3 regions comprising the amino acid sequences of SEQ ID NOs: 1946, 1947, and 1948, respectively.

[0177] In various embodiments, the antibody or antigen binding fragment thereof comprises a heavy chain variable region comprising CDR1, CDR2, and CDR3 regions comprising the amino acid sequences of SEQ ID NOs: 1949, 1950, and 1951, respectively, and/or a light chain variable region comprising CDR1, CDR2, and CDR3 regions comprising the amino acid sequences of SEQ ID NOs: 1952, 1953, and 1954, respectively.

[0178] In various embodiments, the antibody or antigen binding fragment thereof comprises a heavy chain variable region comprising CDR1, CDR2, and CDR3 regions comprising the amino acid sequences of SEQ ID NOs: 1955, 1956, and 1957, respectively, and/or a light chain variable region comprising CDR1, CDR2, and CDR3 regions comprising the amino acid sequences of SEQ ID NOs: 1958, 1959, and 1960, respectively.

[0179] In various embodiments, the antibody or antigen binding fragment thereof comprises a heavy chain variable region comprising CDR1, CDR2, and CDR3 regions comprising the amino acid sequences of SEQ ID NOs: 1961, 1962, and 1963, respectively, and/or a light chain variable region comprising CDR1, CDR2, and CDR3 regions comprising the amino acid sequences of SEQ ID NOs: 1964, 1965, and 1966, respectively.

[0180] In various embodiments, the antibody or antigen binding fragment thereof comprises a heavy chain variable region comprising CDR1, CDR2, and CDR3 regions comprising the amino acid sequences of SEQ ID NOs: 1967, 1968, and 1969, respectively, and/or a light chain variable region comprising CDR1, CDR2, and CDR3 regions comprising the amino acid sequences of SEQ ID NOs: 1970, 1971, and 1972, respectively.

[0181] In various embodiments, the antibody or antigen binding fragment thereof comprises a heavy chain variable region comprising CDR1, CDR2, and CDR3 regions comprising the amino acid sequences of SEQ ID NOs: 1973, 1974, and 1975, respectively, and/or a light chain variable region comprising CDR1, CDR2, and CDR3 regions comprising the amino acid sequences of SEQ ID NOs: 1976, 1977, and 1978, respectively.

[0182] In various embodiments, the antibody or antigen binding fragment thereof comprises a heavy chain variable region comprising CDR1, CDR2, and CDR3 regions comprising the amino acid sequences of SEQ ID NOs: 1979, 1980, and 1981, respectively, and/or a light chain variable region comprising CDR1, CDR2, and CDR3 regions comprising the amino acid sequences of SEQ ID NOs: 1982, 1983, and 1984, respectively.

[0183] In various embodiments, the antibody or antigen binding fragment thereof comprises a heavy chain variable region comprising CDR1, CDR2, and CDR3 regions comprising the amino acid sequences of SEQ ID NOs: 1985, 1986, and 1987, respectively, and/or a light chain variable region comprising CDR1, CDR2, and CDR3 regions comprising the amino acid sequences of SEQ ID NOs: 1988, 1989, and 1990, respectively.

[0184] In various embodiments, the antibody or antigen binding fragment thereof comprises a heavy chain variable region comprising CDR1, CDR2, and CDR3 regions comprising the amino acid sequences of SEQ ID NOs: 1991, 1992, and 1993, respectively, and/or a light chain variable region comprising CDR1, CDR2, and CDR3 regions comprising the amino acid sequences of SEQ ID NOs: 1994, 1995, and 1996, respectively.

[0185] In various embodiments, the antibody or antigen binding fragment thereof comprises a heavy chain variable region comprising CDR1, CDR2, and CDR3 regions comprising the amino acid sequences of SEQ ID NOs: 1997, 1998, and 1999, respectively, and/or a light chain variable region comprising CDR1, CDR2, and CDR3 regions comprising the amino acid sequences of SEQ ID NOs: 2000, 2001, and 2002, respectively.

[0186] In various embodiments, the antibody or antigen binding fragment thereof comprises a heavy chain variable region comprising CDR1, CDR2, and CDR3 regions comprising the amino acid sequences of SEQ ID NOs: 2003, 2004, and 2005, respectively, and/or a light chain variable region comprising CDR1, CDR2, and CDR3 regions comprising the amino acid sequences of SEQ ID NOs: 2006, 2007, and 2008, respectively.

[0187] In various embodiments, the antibody or antigen binding fragment thereof comprises a heavy chain variable region comprising CDR1, CDR2, and CDR3 regions comprising the amino acid sequences of SEQ ID NOs: 2009, 2010, and 2011, respectively, and/or a light chain variable region comprising CDR1, CDR2, and CDR3 regions comprising the amino acid sequences of SEQ ID NOs: 2012, 2013, and 2014, respectively.

[0188] In various embodiments, the antibody or antigen binding fragment thereof comprises a heavy chain variable region comprising CDR1, CDR2, and CDR3 regions comprising the amino acid sequences of SEQ ID NOs: 2015, 2016, and 2017, respectively, and/or a light chain variable region comprising CDR1, CDR2, and CDR3 regions comprising the amino acid sequences of SEQ ID NOs: 2018, 2019, and 2020, respectively.

[0189] In various embodiments, the antibody or antigen binding fragment thereof comprises a heavy chain variable region comprising CDR1, CDR2, and CDR3 regions comprising the amino acid sequences of SEQ ID NOs: 2021, 2022, and 2023, respectively, and/or a light chain variable region comprising CDR1, CDR2, and CDR3 regions comprising the amino acid sequences of SEQ ID NOs: 2024, 2025, and 2026, respectively.

[0190] In various embodiments, the antibody or antigen binding fragment thereof comprises a heavy chain variable region comprising CDR1, CDR2, and CDR3 regions comprising the amino acid sequences of SEQ ID NOs: 2027, 2028, and 2029, respectively, and/or a light chain variable region comprising CDR1, CDR2, and CDR3 regions comprising the amino acid sequences of SEQ ID NOs: 2030, 2031, and 2032, respectively.

[0191] In various embodiments, the antibody or antigen binding fragment thereof comprises a heavy chain variable region comprising CDR1, CDR2, and CDR3 regions comprising the amino acid sequences of SEQ ID NOs: 2033, 2034, and 2035, respectively, and/or a light chain variable region comprising CDR1, CDR2, and CDR3 regions comprising the amino acid sequences of SEQ ID NOs: 2036, 2037, and 2038, respectively.

[0192] In various embodiments, the antibody or antigen binding fragment thereof comprises a heavy chain variable region comprising CDR1, CDR2, and CDR3 regions comprising the amino acid sequences of SEQ ID NOs: 2039, 2040, and 2041, respectively, and/or a light chain variable region comprising CDR1, CDR2, and CDR3 regions comprising the amino acid sequences of SEQ ID NOs: 2042, 2043, and 2044, respectively.

[0193] In various embodiments, the antibody or antigen binding fragment thereof comprises a heavy chain variable region comprising CDR1, CDR2, and CDR3 regions comprising the amino acid sequences of SEQ ID NOs: 2045, 2046, and 2047, respectively, and/or a light chain variable region comprising CDR1, CDR2, and CDR3 regions comprising the amino acid sequences of SEQ ID NOs: 2048, 2049, and 2050, respectively.

[0194] In various embodiments, the antibody or antigen binding fragment thereof comprises a heavy chain variable region comprising CDR1, CDR2, and CDR3 regions comprising the amino acid sequences of SEQ ID NOs: 2051, 2052, and 2053, respectively, and/or a light chain variable region comprising CDR1, CDR2, and CDR3 regions comprising the amino acid sequences of SEQ ID NOs: 2054, 2055, and 2056, respectively.

[0195] In various embodiments, the antibody or antigen binding fragment thereof comprises a heavy chain variable region comprising CDR1, CDR2, and CDR3 regions comprising the amino acid sequences of SEQ ID NOs: 2057, 2058, and 2059, respectively, and/or a light chain variable region comprising CDR1, CDR2, and CDR3 regions comprising the amino acid sequences of SEQ ID NOs: 2060, 2061, and 2062, respectively.

[0196] In various embodiments, the antibody or antigen binding fragment thereof comprises a heavy chain variable region comprising CDR1, CDR2, and CDR3 regions comprising the amino acid sequences of SEQ ID NOs: 2063, 2064, and 2065, respectively, and/or a light chain variable region comprising CDR1, CDR2, and CDR3 regions comprising the amino acid sequences of SEQ ID NOs: 2066, 2067, and 2068, respectively.

[0197] In various embodiments, the antibody or antigen binding fragment thereof comprises a heavy chain variable region comprising CDR1, CDR2, and CDR3 regions comprising the amino acid sequences of SEQ ID NOs: 2069, 2070, and 2071, respectively, and/or a light chain variable region comprising CDR1, CDR2, and CDR3 regions comprising the amino acid sequences of SEQ ID NOs: 2072, 2073, and 2074, respectively.

[0198] In various embodiments, the antibody or antigen binding fragment thereof comprises a heavy chain variable region comprising CDR1, CDR2, and CDR3 regions comprising the amino acid sequences of SEQ ID NOs: 2075, 2076, and 2077, respectively, and/or a light chain variable region comprising CDR1, CDR2, and CDR3 regions comprising the amino acid sequences of SEQ ID NOs: 2078, 2079, and 2080, respectively.

[0199] In various embodiments, the antibody or antigen binding fragment thereof comprises a heavy chain variable region comprising CDR1, CDR2, and CDR3 regions comprising the amino acid sequences of SEQ ID NOs: 2081, 2082, and 2083, respectively, and/or a light chain variable region comprising CDR1, CDR2, and CDR3 regions comprising the amino acid sequences of SEQ ID NOs: 2084, 2085, and 2086, respectively.

[0200] In various embodiments, the antibody or antigen binding fragment thereof comprises a heavy chain variable region comprising CDR1, CDR2, and CDR3 regions comprising the amino acid sequences of SEQ ID NOs: 2087, 2088, and 2089, respectively, and/or a light chain variable region comprising CDR1, CDR2, and CDR3 regions comprising the amino acid sequences of SEQ ID NOs: 2090, 2091, and 2092, respectively.

[0201] In various embodiments, the antibody or antigen binding fragment thereof comprises a heavy chain variable region comprising CDR1, CDR2, and CDR3 regions comprising the amino acid sequences of SEQ ID NOs: 2093, 2094, and 2095, respectively, and/or a light chain variable region comprising CDR1, CDR2, and CDR3 regions comprising the amino acid sequences of SEQ ID NOs: 2096, 2097, and 2098, respectively.

[0202] In various embodiments, the antibody or antigen binding fragment thereof comprises a heavy chain variable region comprising CDR1, CDR2, and CDR3 regions comprising the amino acid sequences of SEQ ID NOs: 2099, 2100, and 2101, respectively, and/or a light chain variable region comprising CDR1, CDR2, and CDR3 regions comprising the amino acid sequences of SEQ ID NOs: 2102, 2103, and 2104, respectively.

[0203] In various embodiments, the antibody or antigen binding fragment thereof comprises a heavy chain variable region comprising CDR1, CDR2, and CDR3 regions comprising the amino acid sequences of SEQ ID NOs: 2105, 2106, and 2107, respectively, and/or a light chain variable region comprising CDR1, CDR2, and CDR3 regions comprising the amino acid sequences of SEQ ID NOs: 2108, 2109, and 2110, respectively.

[0204] In various embodiments, the antibody or antigen binding fragment thereof comprises a heavy chain variable region comprising CDR1, CDR2, and CDR3 regions comprising the amino acid sequences of SEQ ID NOs: 2111, 2112, and 2113, respectively, and/or a light chain variable region comprising CDR1, CDR2, and CDR3 regions comprising the amino acid sequences of SEQ ID NOs: 2114, 2115, and 2116, respectively.

[0205] In various embodiments, the antibody or antigen binding fragment thereof comprises a heavy chain variable region comprising CDR1, CDR2, and CDR3 regions comprising the amino acid sequences of SEQ ID NOs: 2117, 2118, and 2119, respectively, and/or a light chain variable region comprising CDR1, CDR2, and CDR3 regions comprising the amino acid sequences of SEQ ID NOs: 2120, 2121, and 2122, respectively.

[0206] In various embodiments, the antibody or antigen binding fragment thereof comprises a heavy chain variable region comprising CDR1, CDR2, and CDR3 regions comprising the amino acid sequences of SEQ ID NOs: 2123, 2124, and 2125, respectively, and/or a light chain variable region comprising CDR1, CDR2, and CDR3 regions comprising the amino acid sequences of SEQ ID NOs: 2126, 2127, and 2128, respectively.

[0207] In various embodiments, the antibody or antigen binding fragment thereof comprises a heavy chain variable region comprising CDR1, CDR2, and CDR3 regions comprising the amino acid sequences of SEQ ID NOs: 2129, 2130, and 2131, respectively, and/or a light chain variable region comprising CDR1, CDR2, and CDR3 regions comprising the amino acid sequences of SEQ ID NOs: 2132, 2133, and 2134, respectively.

[0208] In various embodiments, the antibody or antigen binding fragment thereof comprises a heavy chain variable region comprising CDR1, CDR2, and CDR3 regions comprising the amino acid sequences of SEQ ID NOs: 2135, 2136, and 2137, respectively, and/or a light chain variable region comprising CDR1, CDR2, and CDR3 regions comprising the amino acid sequences of SEQ ID NOs: 2138, 2139, and 2140, respectively.

[0209] In various embodiments, the antibody or antigen binding fragment thereof comprises a heavy chain variable region comprising CDR1, CDR2, and CDR3 regions comprising the amino acid sequences of SEQ ID NOs: 2141, 2142, and 2143, respectively, and/or a light chain variable region comprising CDR1, CDR2, and CDR3 regions comprising the amino acid sequences of SEQ ID NOs: 2144, 2145, and 2146, respectively.

[0210] In various embodiments, the antibody or antigen binding fragment thereof comprises a heavy chain variable region comprising CDR1, CDR2, and CDR3 regions comprising the amino acid sequences of SEQ ID NOs: 2147, 2148, and 2149, respectively, and/or a light chain variable region comprising CDR1, CDR2, and CDR3 regions comprising the amino acid sequences of SEQ ID NOs: 2150, 2151, and 2152, respectively.

[0211] In various embodiments, the antibody or antigen binding fragment thereof comprises a heavy chain variable region comprising CDR1, CDR2, and CDR3 regions comprising the amino acid sequences of SEQ ID NOs: 2153, 2154, and 2155, respectively, and/or a light chain variable region comprising CDR1, CDR2, and CDR3 regions comprising the amino acid sequences of SEQ ID NOs: 2156, 2157, and 2158, respectively.

[0212] In various embodiments, the antibody or antigen binding fragment thereof comprises a heavy chain variable region comprising CDR1, CDR2, and CDR3 regions comprising the amino acid sequences of SEQ ID NOs: 2159, 2160, and 2161, respectively, and/or a light chain variable region comprising CDR1, CDR2, and CDR3 regions comprising the amino acid sequences of SEQ ID NOs: 2162, 2163, and 2164, respectively.

[0213] In various embodiments, the antibody or antigen binding fragment thereof comprises a heavy chain variable region comprising CDR1, CDR2, and CDR3 regions comprising the amino acid sequences of SEQ ID NOs: 2165, 2166, and 2167, respectively, and/or a light chain variable region comprising CDR1, CDR2, and CDR3 regions comprising the amino acid sequences of SEQ ID NOs: 2168, 2169, and 2170, respectively.

[0214] In various embodiments, the antibody or antigen binding fragment thereof comprises a heavy chain variable region comprising CDR1, CDR2, and CDR3 regions comprising the amino acid sequences of SEQ ID NOs: 2171, 2172, and 2173, respectively, and/or a light chain variable region comprising CDR1, CDR2, and CDR3 regions comprising the amino acid sequences of SEQ ID NOs: 2174, 2175, and 2176, respectively.

[0215] In various embodiments, the antibody or antigen binding fragment thereof comprises a heavy chain variable region comprising CDR1, CDR2, and CDR3 regions comprising the amino acid sequences of SEQ ID NOs: 2177, 2178, and 2179, respectively, and/or a light chain variable region comprising CDR1, CDR2, and CDR3 regions comprising the amino acid sequences of SEQ ID NOs: 2180, 2181, and 2182, respectively.

[0216] In various embodiments, the antibody or antigen binding fragment thereof comprises a heavy chain variable region comprising CDR1, CDR2, and CDR3 regions comprising the amino acid sequences of SEQ ID NOs: 2183, 2184, and 2185, respectively, and/or a light chain variable region comprising CDR1, CDR2, and CDR3 regions comprising the amino acid sequences of SEQ ID NOs: 2186, 2187, and 2188, respectively.

[0217] In various embodiments, the antibody or antigen binding fragment thereof comprises a heavy chain variable region comprising CDR1, CDR2, and CDR3 regions comprising the amino acid sequences of SEQ ID NOs: 2189, 2190, and 2191, respectively, and/or a light chain variable region comprising CDR1, CDR2, and CDR3 regions comprising the amino acid sequences of SEQ ID NOs: 2192, 2193, and 2194, respectively.

[0218] In various embodiments, the antibody or antigen binding fragment thereof comprises a heavy chain variable region comprising CDR1, CDR2, and CDR3 regions comprising the amino acid sequences of SEQ ID NOs: 2195, 2196, and 2197, respectively, and/or a light chain variable region comprising CDR1, CDR2, and CDR3 regions comprising the amino acid sequences of SEQ ID NOs: 2198, 2199, and 2200, respectively.

[0219] In various embodiments, the antibody or antigen binding fragment thereof comprises a heavy chain variable region comprising CDR1, CDR2, and CDR3 regions comprising the amino acid sequences of SEQ ID NOs: 2201, 2202, and 2203, respectively, and/or a light chain variable region comprising CDR1, CDR2, and CDR3 regions comprising the amino acid sequences of SEQ ID NOs: 2204, 2205, and 2206, respectively.

[0220] In various embodiments, the antibody or antigen binding fragment thereof comprises a heavy chain variable region comprising CDR1, CDR2, and CDR3 regions comprising the amino acid sequences of SEQ ID NOs: 2207, 2208, and 2209, respectively, and/or a light chain variable region comprising CDR1, CDR2, and CDR3 regions comprising the amino acid sequences of SEQ ID NOs: 2210, 2211, and 2212, respectively.

[0221] Another aspect of the invention provides an isolated antibody or antigen binding fragment thereof which specifically binds to LAP comprising a heavy chain variable region comprising CDR1, CDR2, and CDR3 regions comprising CDR1, CDR2, and CDR3 amino acid sequences selected from the group of sequences set forth in Table 42, Table 43 and/or Table 45A and a light chain variable region comprising CDR1, CDR2, and CDR3 regions comprising CDR1, CDR2, and CDR3 amino acid sequences selected from the group of sequences set forth in Table 42, Table 43 and/or Table 45A.

[0222] In various embodiments, the CDR1, CDR2, and CDR3 amino acid sequences in the heavy chain variable region and/or the CDR1, CDR2, and CDR3 amino acid sequences in the light chain variable region are selected from the group of sequences set forth in SEQ ID NOs: 1565-2212. In various embodiments, the CDR1, CDR2, and CDR3 amino acid sequences in the heavy chain variable region and/or the light chain variable region comprising CDR1, CDR2, and CDR3 amino acid sequences are selected from the group of sequences set forth in SEQ ID NOs: 2229-2570. In various embodiments, the CDR1, CDR2, and CDR3 amino acid sequences in the heavy chain variable region and the CDR1, CDR2, and CDR3 amino acid sequences in the light chain variable region are selected from the group of sequences set forth in SEQ ID NOs: 2229-2570.

[0223] In various embodiments, the CDR1, CDR2, and CDR3 regions in the heavy chain variable region and the light chain variable region comprising CDR1, CDR2, and CDR3 amino acid sequences selected from the group of sequences set forth in SEQ ID NOs: 1565-2212 as described in Table 43. In various embodiments, the CDR1, CDR2, and CDR3 regions in the heavy chain variable region and the light chain variable region comprising CDR1, CDR2, and CDR3 amino acid sequences selected from the group of sequences set forth in SEQ ID NOs: 2229-2570 as set forth in Table 45A. In various embodiments, the CDR1, CDR2, and CDR3 regions in the heavy chain variable region and the light chain variable region comprising CDR1, CDR2, and CDR3 amino acid sequences as described below:

Kabat

| heavy chain variable region | | | light chain variable region | | |
|---|---|---|---|---|---|
| CDR1 | CDR2 | CDR3 | CDR1 | CDR2 | CDR3 |
| 2229 | 2230 | 2231 | 2232 | 2233 | 2234 |
| 2253 | 2254 | 2255 | 2256 | 2257 | 2258 |
| 2277 | 2278 | 2279 | 2280 | 2281 | 2282 |
| 2301 | 2302 | 2303 | 2304 | 2305 | 2306 |
| 2325 | 2326 | 2327 | 2328 | 2329 | 2330 |
| 2349 | 2350 | 2351 | 2352 | 2353 | 2354 |
| 2373 | 2374 | 2375 | 2376 | 2377 | 2378 |
| 2397 | 2398 | 2399 | 2400 | 2401 | 2402 |
| 2421 | 2422 | 2423 | 2424 | 2425 | 2426 |
| 2445 | 2446 | 2447 | 2448 | 2449 | 2450 |
| 2469 | 2470 | 2471 | 2472 | 2473 | 2474 |
| 2493 | 2494 | 2495 | 2496 | 2497 | 2498 |
| 2517 | 2518 | 2519 | 2520 | 2521 | 2522 |
| 2541 | 2542 | 2543 | 2544 | 2545 | 2546 |
| 2565 | 2566 | 2567 | 2568 | 2569 | 2570 |

[0224] In various embodiments, the CDR1, CDR2, and CDR3 regions amino acid sequences in the heavy chain variable region and the light chain variable region comprising CDR1, CDR2, and CDR3 amino acid sequences as described in the light chain variable region are selected from the below table:

Chothia

| heavy chain variable region | | | light chain variable region | | |
|---|---|---|---|---|---|
| CDR1 | CDR2 | CDR3 | CDR1 | CDR2 | CDR3 |
| 2235 | 2236 | 2237 | 2238 | 2239 | 2240 |
| 2259 | 2260 | 2261 | 2262 | 2263 | 2264 |
| 2283 | 2284 | 2285 | 2286 | 2287 | 2288 |
| 2307 | 2308 | 2309 | 2310 | 2311 | 2312 |
| 2331 | 2332 | 2333 | 2334 | 2335 | 2336 |
| 2355 | 2356 | 2357 | 2358 | 2359 | 2360 |
| 2379 | 2380 | 2381 | 2382 | 2383 | 2384 |
| 2403 | 2404 | 2405 | 2406 | 2407 | 2408 |
| 2427 | 2428 | 2429 | 2430 | 2431 | 2432 |
| 2451 | 2452 | 2453 | 2454 | 2455 | 2456 |
| 2475 | 2476 | 2477 | 2478 | 2479 | 2480 |
| 2499 | 2500 | 2501 | 2502 | 2503 | 2504 |
| 2523 | 2524 | 2525 | 2526 | 2527 | 2528 |
| 2547 | 2548 | 2549 | 2550 | 2551 | 2552 |
| 2571 | 2572 | 2573 | 2574 | 2575 | 2576 |

[0225] In various embodiments, the CDR1, CDR2, and CDR3 regions amino acid sequences in the heavy chain variable region and the light chain variable region comprising CDR1, CDR2, and CDR3 amino acid sequences as described in the light chain variable region are selected from the below table:

ABM

| heavy chain variable region | | | light chain variable region | | |
|---|---|---|---|---|---|
| CDR1 | CDR2 | CDR3 | CDR1 | CDR2 | CDR3 |
| 2241 | 2242 | 2243 | 2244 | 2245 | 2246 |
| 2265 | 2266 | 2267 | 2268 | 2269 | 2270 |
| 2289 | 2290 | 2291 | 2292 | 2293 | 2294 |
| 2313 | 2314 | 2315 | 2316 | 2317 | 2318 |
| 2337 | 2338 | 2339 | 2340 | 2341 | 2342 |
| 2361 | 2362 | 2363 | 2364 | 2365 | 2366 |
| 2385 | 2386 | 2387 | 2388 | 2389 | 2390 |
| 2409 | 2410 | 2411 | 2412 | 2413 | 2414 |
| 2433 | 2434 | 2435 | 2436 | 2437 | 2438 |
| 2457 | 2458 | 2459 | 2460 | 2461 | 2462 |
| 2481 | 2482 | 2483 | 2484 | 2485 | 2486 |
| 2505 | 2506 | 2507 | 2508 | 2509 | 2510 |
| 2529 | 2530 | 2531 | 2532 | 2533 | 2534 |
| 2553 | 2554 | 2555 | 2556 | 2557 | 2558 |
| 2577 | 2578 | 2579 | 2580 | 2581 | 2582 |

[0226] In various embodiments, the CDR1, CDR2, and CDR3 amino acid sequences in the heavy chain variable region and the CDR1, CDR2, and CDR3 amino acid sequences in the light chain variable region are selected from the below table:

IMGT

| heavy chain variable region | | | light chain variable region | | |
|---|---|---|---|---|---|
| CDR1 | CDR2 | CDR3 | CDR1 | CDR2 | CDR3 |
| 2247 | 2248 | 2249 | 2250 | 2251 | 2252 |
| 2271 | 2272 | 2273 | 2274 | 2275 | 2276 |
| 2295 | 2296 | 2297 | 2298 | 2299 | 2300 |
| 2319 | 2320 | 2321 | 2322 | 2323 | 2324 |
| 2343 | 2344 | 2345 | 2346 | 2347 | 2348 |
| 2367 | 2368 | 2369 | 2370 | 2371 | 2372 |
| 2391 | 2392 | 2393 | 2394 | 2395 | 2396 |
| 2415 | 2416 | 2417 | 2418 | 2419 | 2420 |
| 2439 | 2440 | 2441 | 2442 | 2443 | 2444 |
| 2463 | 2464 | 2465 | 2466 | 2467 | 2468 |
| 2487 | 2488 | 2489 | 2490 | 2491 | 2492 |
| 2511 | 2512 | 2513 | 2514 | 2515 | 2516 |
| 2535 | 2536 | 2537 | 2538 | 2539 | 2540 |
| 2559 | 2560 | 2561 | 2562 | 2563 | 2564 |
| 2583 | 2584 | 2585 | 2586 | 2587 | 2588 |

[0227] In various embodiments, the antibody or antigen binding fragment thereof comprises a heavy chain variable region sequence comprising an amino acid sequence selected from the group consisting of SEQ ID NOs: 575-622, 661-685, 712-756, 794-827, 849-893; 921-950, 971-1009, 1037-1067, 1089-1113, 1138-1179, and 2589-2603.

[0228] In various embodiments, the antibody or antigen binding fragment thereof comprises a heavy chain variable region sequence which is at least 85%, 90%, 95%, 98%, or 99% identical to an amino acid sequence selected from the group consisting of SEQ ID NOs: 575-622, 661-685, 712-756, 794-827, 849-893; 921-950, 971-1009, 1037-1067, 1089-1113, 1138-1179, and −2589-2603.

[0229] In various embodiments, the antibody or antigen binding fragment thereof comprises a light chain variable region sequence selected from the group consisting of SEQ ID NOs: 623-660; 686-711, 757-793; 828-848, 894-920, 951-970, 1010-1036, 1068-1088, 1114-1137, and 1180-1211.

[0230] In various embodiments, the antibody or antigen binding fragment thereof comprises a light chain variable region sequence which is at least 85%, 90%, 95%, 98%, or 99% identical to the amino acid sequence selected from the group consisting of SEQ ID NOs: 623-660; 686-711, 757-793; 828-848, 894-920, 951-970, 1010-1036, 1068-1088, 1114-1137, and 1180-1211.

[0231] In various embodiments, the antibody or antigen binding fragment thereof comprises a heavy chain variable region sequence comprising the amino acid sequence selected from the group consisting of SEQ ID NOs: 98, 108, 118, 128, 138, 148, 158, 168, 178, 188, 198, 208, 218, 228, 238, 248, 258, 268, 278, 288, 298, 308, 318, 328, 338, 348, 358, 368, 378, 388, 398, 408, 418, 428, 438, 458, 468, 478, 488, 498, 508, 518, 528, and 538.

[0232] In various embodiments, the antibody or antigen binding fragment thereof comprises a heavy chain variable region sequence which is at least 85%, 90%, 95%, 98%, or 99% identical to the amino acid sequence selected from the group consisting of SEQ ID NOs: 98, 108, 118, 128, 138, 148, 158, 168, 178, 188, 198, 208, 218, 228, 238, 248, 258, 268, 278, 288, 298, 308, 318, 328, 338, 348, 358, 368, 378, 388, 398, 408, 418, 428, 438, 458, 468, 478, 488, 498, 508, 518, 528, and 538.

[0233] In various embodiments, the antibody or antigen binding fragment thereof comprises a light chain variable region sequence comprising the amino acid sequence selected from the group consisting of SEQ ID NOs: 103, 113, 123, 133, 143, 153, 163, 173, 183, 193, 203, 213, 223, 233, 243, 253, 263, 273, 283, 293, 303, 313, 323, 333, 343, 353, 363, 373, 383, 393, 403, 413, 423, 433, 443, 463, 473, 483, 493, 503, 513, 523, 533, and 543.

[0234] In various embodiments, the antibody or antigen binding fragment thereof comprises a light chain variable region sequence which is at least 85%, 90%, 95%, 98%, or 99% identical to the amino acid sequence selected from the group consisting of SEQ ID NOs: 103, 113, 123, 133, 143, 153, 163, 173, 183, 193, 203, 213, 223, 233, 243, 253, 263, 273, 283, 293, 303, 313, 323, 333, 343, 353, 363, 373, 383, 393, 403, 413, 423, 433, 443, 463, 473, 483, 493, 503, 513, 523, 533, and 543.

[0235] In various embodiments, the antibody or antigen binding fragment thereof comprises a heavy chain variable region sequence comprising an amino acid sequence selected from the group consisting of SEQ ID NOs: 548, 558, and 568; or comprises a heavy chain variable region sequence which is at least 85%, 90%, 95%, 98%, or 99% identical to an amino acid sequence selected from the group consisting of SEQ ID NOs: 548, 558, and 568.

[0236] In various embodiments, the antibody or antigen binding fragment thereof comprises a light chain variable region sequence comprising an amino acid sequence selected from the group consisting of SEQ ID NOs: 553, 563, and 573; or comprises a light chain variable region sequence which is at least 85%, 90%, 95%, 98%, or 99% identical to an amino acid sequence selected from the group consisting of SEQ ID NOs: 548, 558, and 568.

[0237] In various embodiments, the antibody or antigen binding fragment thereof comprises a heavy chain variable region sequence comprising an amino acid sequence selected from the group consisting of SEQ ID NOs: 46, 51, 56, 61, 66, 71, 76, 81, 86, and 91; or comprises a heavy chain variable region sequence which is at least 85%, 90%, 95%, 98%, or 99% identical to an amino acid sequence selected from the group consisting of SEQ ID NOs: 46, 51, 56, 61, 66, 71, 76, 81, 86, and 91.

[0238] In various embodiments, the antibody or antigen binding fragment thereof comprises a light chain variable region sequence comprising an amino acid sequence selected from the group consisting of SEQ ID NOs: 11, 16, 21, 26, 31, 36, and 41; or comprises a light chain variable region sequence which is at least 85%, 90%, 95%, 98%, or 99% identical to an amino acid sequence selected from the group consisting of SEQ ID NOs: 11, 16, 21, 26, 31, 36, and 41.

[0239] In various embodiments, the antibody or antigen binding fragment thereof comprises a heavy chain variable region sequence comprising the amino acid sequence of SEQ ID NO: 1212; or comprises a heavy chain variable region sequence which is at least 85%, 90%, 95%, 98%, or 99% identical to the amino acid sequence of SEQ ID NO: 1212.

[0240] In various embodiments, the antibody or antigen binding fragment thereof comprises a light chain variable region sequence comprising the amino acid sequence of SEQ ID NO: 1216; or comprises a light chain variable region sequence which is at least 85%, 90%, 95%, 98%, or 99% identical to the amino acid sequence of SEQ ID NO: 1216.

[0241] In various embodiments, the antibody or antigen binding fragment thereof comprises a heavy chain variable region sequence comprising the amino acid sequence of SEQ ID NO: 1220; or comprises a heavy chain variable region sequence which is at least 85%, 90%, 95%, 98%, or 99% identical to the amino acid sequence of SEQ ID NO: 1220.

[0242] In various embodiments, the antibody or antigen binding fragment thereof comprises a light chain variable region sequence comprising the amino acid sequence of SEQ ID NO: 1224; or comprises a light chain variable region sequence which is at least 85%, 90%, 95%, 98%, or 99% identical to the amino acid sequence of SEQ ID NO: 1224.

[0243] In various embodiments, the antibody or antigen binding fragment thereof comprises a heavy chain variable region sequence comprising the amino acid sequence of SEQ ID NO: 1228; or comprises a heavy chain variable region sequence which is at least 85%, 90%, 95%, 98%, or 99% identical to the amino acid sequence of SEQ ID NO: 1228.

[0244] In various embodiments, the antibody or antigen binding fragment thereof comprises a light chain variable region sequence comprising the amino acid sequence of SEQ ID NO: 1232; or comprises a light chain variable region sequence which is at least 85%, 90%, 95%, 98%, or 99% identical to the amino acid sequence of SEQ ID NO: 1232.

[0245] In various embodiments, the antibody or antigen binding fragment thereof comprises a heavy chain variable region sequence comprising the amino acid sequence of SEQ ID NO: 1236; or comprises a heavy chain variable region sequence which is at least 85%, 90%, 95%, 98%, or 99% identical to the amino acid sequence of SEQ ID NO: 1236.

[0246] In various embodiments, the antibody or antigen binding fragment thereof comprises a light chain variable region sequence comprising the amino acid sequence of SEQ ID NO: 1240; or comprises a light chain variable region sequence which is at least 85%, 90%, 95%, 98%, or 99% identical to the amino acid sequence of SEQ ID NO: 1240.

[0247] In various embodiments, the antibody or antigen binding fragment thereof comprises a heavy chain variable region sequence comprising the amino acid sequence of SEQ ID NO: 1244; or comprises a heavy chain variable region sequence which is at least 85%, 90%, 95%, 98%, or 99% identical to the amino acid sequence of SEQ ID NO: 1244.

[0248] In various embodiments, the antibody or antigen binding fragment thereof comprises a light chain variable region sequence comprising the amino acid sequence of SEQ ID NO: 1248; or comprises a light chain variable region sequence which is at least 85%, 90%, 95%, 98%, or 99% identical to the amino acid sequence of SEQ ID NO: 1248.

[0249] In various embodiments, the antibody or antigen binding fragment thereof comprises a heavy chain variable region sequence comprising the amino acid sequence of SEQ ID NO: 1252; or comprises a heavy chain variable region sequence which is at least 85%, 90%, 95%, 98%, or 99% identical to the amino acid sequence of SEQ ID NO: 1252.

[0250] In various embodiments, the antibody or antigen binding fragment thereof comprises a light chain variable region sequence comprising the amino acid sequence of SEQ ID NO: 1256; or comprises a light chain variable region sequence which is at least 85%, 90%, 95%, 98%, or 99% identical to the amino acid sequence of SEQ ID NO: 1256.

[0251] In various embodiments, the antibody or antigen binding fragment thereof comprises a heavy chain variable region sequence comprising the amino acid sequence of SEQ ID NO: 1260; or comprises a heavy chain variable region sequence which is at least 85%, 90%, 95%, 98%, or 99% identical to the amino acid sequence of SEQ ID NO: 1260.

[0252] In various embodiments, the antibody or antigen binding fragment thereof comprises a light chain variable region sequence comprising the amino acid sequence of SEQ ID NO: 1264; or comprises a light chain variable region sequence which is at least 85%, 90%, 95%, 98%, or 99% identical to the amino acid sequence of SEQ ID NO: 1264.

[0253] In various embodiments, the antibody or antigen binding fragment thereof comprises a heavy chain variable region sequence comprising the amino acid sequence of SEQ ID NO: 1268; or comprises a heavy chain variable region sequence which is at least 85%, 90%, 95%, 98%, or 99% identical to the amino acid sequence of SEQ ID NO: 1268.

[0254] In various embodiments, the antibody or antigen binding fragment thereof comprises a light chain variable region sequence comprising the amino acid sequence of SEQ ID NO: 1272; or comprises a light chain variable region sequence which is at least 85%, 90%, 95%, 98%, or 99% identical to the amino acid sequence of SEQ ID NO: 1272.

[0255] In various embodiments, the antibody or antigen binding fragment thereof comprises a heavy chain variable region sequence comprising the amino acid sequence of SEQ ID NO: 1276; or comprises a heavy chain variable region sequence which is at least 85%, 90%, 95%, 98%, or 99% identical to the amino acid sequence of SEQ ID NO: 1276.

[0256] In various embodiments, the antibody or antigen binding fragment thereof comprises a light chain variable region sequence comprising the amino acid sequence of SEQ ID NO: 1280; or comprises a light chain variable region sequence which is at least 85%, 90%, 95%, 98%, or 99% identical to the amino acid sequence of SEQ ID NO: 1280.

[0257] In various embodiments, the antibody or antigen binding fragment thereof comprises a heavy chain variable region sequence comprising the amino acid sequence of SEQ ID NO: 1284; or comprises a heavy chain variable region sequence which is at least 85%, 90%, 95%, 98%, or 99% identical to the amino acid sequence of SEQ ID NO: 1284.

[0258] In various embodiments, the antibody or antigen binding fragment thereof comprises a light chain variable region sequence comprising the amino acid sequence of SEQ ID NO: 1288; or comprises a light chain variable region sequence which is at least 85%, 90%, 95%, 98%, or 99% identical to the amino acid sequence of SEQ ID NO: 1288.

[0259] In various embodiments, the antibody or antigen binding fragment thereof comprises a heavy chain variable region sequence comprising the amino acid sequence of SEQ ID NO: 1295; or comprises a heavy chain variable region sequence which is at least 85%, 90%, 95%, 98%, or 99% identical to the amino acid sequence of SEQ ID NO: 1295.

[0260] In various embodiments, the antibody or antigen binding fragment thereof comprises a light chain variable region sequence comprising the amino acid sequence of SEQ ID NO: 1300; or comprises a light chain variable region sequence which is at least 85%, 90%, 95%, 98%, or 99% identical to the amino acid sequence of SEQ ID NO: 1300.

[0261] In various embodiments, the antibody or antigen binding fragment thereof comprises a heavy chain variable region sequence comprising the amino acid sequence of SEQ ID NO: 1305; or comprises a heavy chain variable region sequence which is at least 85%, 90%, 95%, 98%, or 99% identical to the amino acid sequence of SEQ ID NO: 1305.

[0262] In various embodiments, the antibody or antigen binding fragment thereof comprises a light chain variable region sequence comprising the amino acid sequence of SEQ ID NO: 1310; or comprises a light chain variable region sequence which is at least 85%, 90%, 95%, 98%, or 99% identical to the amino acid sequence of SEQ ID NO: 1310.

[0263] In various embodiments, the antibody or antigen binding fragment thereof comprises a heavy chain variable region sequence comprising the amino acid sequence of SEQ ID NO: 1315; or comprises a heavy chain variable region sequence which is at least 85%, 90%, 95%, 98%, or 99% identical to the amino acid sequence of SEQ ID NO: 1315.

[0264] In various embodiments, the antibody or antigen binding fragment thereof comprises a light chain variable region sequence comprising the amino acid sequence of SEQ ID NO: 1320; or comprises a light chain variable region sequence which is at least 85%, 90%, 95%, 98%, or 99% identical to the amino acid sequence of SEQ ID NO: 1320.

[0265] In various embodiments, the antibody or antigen binding fragment thereof comprises a heavy chain variable region sequence comprising the amino acid sequence of SEQ ID NO: 1325; or comprises a heavy chain variable region sequence which is at least 85%, 90%, 95%, 98%, or 99% identical to the amino acid sequence of SEQ ID NO: 1325.

[0266] In various embodiments, the antibody or antigen binding fragment thereof comprises a light chain variable region sequence comprising the amino acid sequence of SEQ ID NO: 1330; or comprises a light chain variable region sequence which is at least 85%, 90%, 95%, 98%, or 99% identical to the amino acid sequence of SEQ ID NO: 1330.

[0267] In various embodiments, the antibody or antigen binding fragment thereof comprises a heavy chain variable region sequence comprising the amino acid sequence of SEQ ID NO: 1335; or comprises a heavy chain variable region sequence which is at least 85%, 90%, 95%, 98%, or 99% identical to the amino acid sequence of SEQ ID NO: 1335.

[0268] In various embodiments, the antibody or antigen binding fragment thereof comprises a light chain variable region sequence comprising the amino acid sequence of SEQ ID NO: 1340; or comprises a light chain variable region sequence which is at least 85%, 90%, 95%, 98%, or 99% identical to the amino acid sequence of SEQ ID NO: 1340.

[0269] In various embodiments, the antibody or antigen binding fragment thereof comprises a heavy chain variable region sequence comprising the amino acid sequence of SEQ ID NO: 1345; or comprises a heavy chain variable region sequence which is at least 85%, 90%, 95%, 98%, or 99% identical to the amino acid sequence of SEQ ID NO: 1345.

[0270] In various embodiments, the antibody or antigen binding fragment thereof comprises a light chain variable region sequence comprising the amino acid sequence of SEQ ID NO: 1350; or comprises a light chain variable region sequence which is at least 85%, 90%, 95%, 98%, or 99% identical to the amino acid sequence of SEQ ID NO: 1350.

[0271] In various embodiments, the antibody or antigen binding fragment thereof comprises a heavy chain variable region sequence comprising the amino acid sequence of SEQ ID NO: 1355; or comprises a heavy chain variable region sequence which is at least 85%, 90%, 95%, 98%, or 99% identical to the amino acid sequence of SEQ ID NO: 1355.

[0272] In various embodiments, the antibody or antigen binding fragment thereof comprises a light chain variable region sequence comprising the amino acid sequence of SEQ ID NO: 1360; or comprises a light chain variable region sequence which is at least 85%, 90%, 95%, 98%, or 99% identical to the amino acid sequence of SEQ ID NO: 1360.

[0273] In various embodiments, the antibody or antigen binding fragment thereof comprises a heavy chain variable region sequence comprising the amino acid sequence of SEQ ID NO: 1365; or comprises a heavy chain variable region sequence which is at least 85%, 90%, 95%, 98%, or 99% identical to the amino acid sequence of SEQ ID NO: 1365.

[0274] In various embodiments, the antibody or antigen binding fragment thereof comprises a light chain variable region sequence comprising the amino acid sequence of SEQ ID NO: 1370; or comprises a light chain variable region sequence which is at least 85%, 90%, 95%, 98%, or 99% identical to the amino acid sequence of SEQ ID NO: 1370.

[0275] In various embodiments, the antibody or antigen binding fragment thereof comprises a heavy chain variable region sequence comprising the amino acid sequence of SEQ ID NO: 1375; or comprises a heavy chain variable region sequence which is at least 85%, 90%, 95%, 98%, or 99% identical to the amino acid sequence of SEQ ID NO: 1375.

[0276] In various embodiments, the antibody or antigen binding fragment thereof comprises a light chain variable region sequence comprising the amino acid sequence of SEQ ID NO: 1380; or comprises a light chain variable region sequence which is at least 85%, 90%, 95%, 98%, or 99% identical to the amino acid sequence of SEQ ID NO: 1380.

[0277] In various embodiments, the antibody or antigen binding fragment thereof comprises a heavy chain variable region sequence comprising the amino acid sequence of SEQ ID NO: 1385; or comprises a heavy chain variable region sequence which is at least 85%, 90%, 95%, 98%, or 99% identical to the amino acid sequence of SEQ ID NO: 1385.

[0278] In various embodiments, the antibody or antigen binding fragment thereof comprises a light chain variable region sequence comprising the amino acid sequence of SEQ ID NO: 1390; or comprises a light chain variable region sequence which is at least 85%, 90%, 95%, 98%, or 99% identical to the amino acid sequence of SEQ ID NO: 1390.

[0279] In various embodiments, the antibody or antigen binding fragment thereof comprises a heavy chain variable region sequence comprising the amino acid sequence of SEQ ID NO: 1395; or comprises a heavy chain variable region sequence which is at least 85%, 90%, 95%, 98%, or 99% identical to the amino acid sequence of SEQ ID NO: 1395.

[0280] In various embodiments, the antibody or antigen binding fragment thereof comprises a light chain variable region sequence comprising the amino acid sequence of SEQ ID NO: 1400; or comprises a light chain variable region sequence which is at least 85%, 90%, 95%, 98%, or 99% identical to the amino acid sequence of SEQ ID NO: 1400.

[0281] In various embodiments, the antibody or antigen binding fragment thereof comprises a heavy chain variable region sequence comprising the amino acid sequence of SEQ ID NO: 1405; or comprises a heavy chain variable region sequence which is at least 85%, 90%, 95%, 98%, or 99% identical to the amino acid sequence of SEQ ID NO: 1405.

[0282] In various embodiments, the antibody or antigen binding fragment thereof comprises a light chain variable region sequence comprising the amino acid sequence of SEQ ID NO: 1410; or comprises a light chain variable region sequence which is at least 85%, 90%, 95%, 98%, or 99% identical to the amino acid sequence of SEQ ID NO: 1410.

[0283] In various embodiments, the antibody or antigen binding fragment thereof comprises a heavy chain variable region sequence comprising the amino acid sequence of SEQ ID NO: 1415; or comprises a heavy chain variable region sequence which is at least 85%, 90%, 95%, 98%, or 99% identical to the amino acid sequence of SEQ ID NO: 1415.

[0284] In various embodiments, the antibody or antigen binding fragment thereof comprises a light chain variable region sequence comprising the amino acid sequence of SEQ ID NO: 1420; or comprises a light chain variable region sequence which is at least 85%, 90%, 95%, 98%, or 99% identical to the amino acid sequence of SEQ ID NO: 1420.

[0285] In various embodiments, the antibody or antigen binding fragment thereof comprises a heavy chain variable region sequence comprising the amino acid sequence of SEQ ID NO: 1425; or comprises a heavy chain variable region sequence which is at least 85%, 90%, 95%, 98%, or 99% identical to the amino acid sequence of SEQ ID NO: 1425.

[0286] In various embodiments, the antibody or antigen binding fragment thereof comprises a light chain variable region sequence comprising the amino acid sequence of SEQ ID NO: 1430; or comprises a light chain variable region sequence which is at least 85%, 90%, 95%, 98%, or 99% identical to the amino acid sequence of SEQ ID NO: 1430.

[0287] In various embodiments, the antibody or antigen binding fragment thereof comprises a heavy chain variable region sequence comprising the amino acid sequence of SEQ ID NO: 1435; or comprises a heavy chain variable region sequence which is at least 85%, 90%, 95%, 98%, or 99% identical to the amino acid sequence of SEQ ID NO: 1435.

[0288] In various embodiments, the antibody or antigen binding fragment thereof comprises a light chain variable region sequence comprising the amino acid sequence of SEQ ID NO: 1440; or comprises a light chain variable region sequence which is at least 85%, 90%, 95%, 98%, or 99% identical to the amino acid sequence of SEQ ID NO: 1440.

[0289] In various embodiments, the antibody or antigen binding fragment thereof comprises a heavy chain variable region sequence comprising the amino acid sequence of SEQ ID NO: 1445; or comprises a heavy chain variable region sequence which is at least 85%, 90%, 95%, 98%, or 99% identical to the amino acid sequence of SEQ ID NO: 1445.

[0290] In various embodiments, the antibody or antigen binding fragment thereof comprises a light chain variable region sequence comprising the amino acid sequence of SEQ ID NO: 1450; or comprises a light chain variable region sequence which is at least 85%, 90%, 95%, 98%, or 99% identical to the amino acid sequence of SEQ ID NO: 1450.

[0291] In various embodiments, the antibody or antigen binding fragment thereof comprises a heavy chain variable region sequence comprising the amino acid sequence of SEQ ID NO: 1455; or comprises a heavy chain variable region sequence which is at least 85%, 90%, 95%, 98%, or 99% identical to the amino acid sequence of SEQ ID NO: 1455.

[0292] In various embodiments, the antibody or antigen binding fragment thereof comprises a light chain variable region sequence comprising the amino acid sequence of SEQ ID NO: 1460; or comprises a light chain variable region sequence which is at least 85%, 90%, 95%, 98%, or 99% identical to the amino acid sequence of SEQ ID NO: 1460.

[0293] In various embodiments, the antibody or antigen binding fragment thereof comprises a heavy chain variable region sequence comprising the amino acid sequence of SEQ ID NO: 1465; or comprises a heavy chain variable region sequence which is at least 85%, 90%, 95%, 98%, or 99% identical to the amino acid sequence of SEQ ID NO: 1465.

[0294] In various embodiments, the antibody or antigen binding fragment thereof comprises a light chain variable region sequence comprising the amino acid sequence of SEQ ID NO: 1470; or comprises a light chain variable region sequence which is at least 85%, 90%, 95%, 98%, or 99% identical to the amino acid sequence of SEQ ID NO: 1470.

[0295] In various embodiments, the antibody or antigen binding fragment thereof comprises a heavy chain variable region sequence comprising the amino acid sequence of SEQ ID NO: 1475; or comprises a heavy chain variable region sequence which is at least 85%, 90%, 95%, 98%, or 99% identical to the amino acid sequence of SEQ ID NO: 1475.

[0296] In various embodiments, the antibody or antigen binding fragment thereof comprises a light chain variable region sequence comprising the amino acid sequence of SEQ ID NO: 1480; or comprises a light chain variable region sequence which is at least 85%, 90%, 95%, 98%, or 99% identical to the amino acid sequence of SEQ ID NO: 1480.

[0297] In various embodiments, the antibody or antigen binding fragment thereof comprises a heavy chain variable region sequence comprising the amino acid sequence of SEQ ID NO: 1485; or comprises a heavy chain variable region sequence which is at least 85%, 90%, 95%, 98%, or 99% identical to the amino acid sequence of SEQ ID NO: 1485.

[0298] In various embodiments, the antibody or antigen binding fragment thereof comprises a light chain variable region sequence comprising the amino acid sequence of SEQ ID NO: 1490; or comprises a light chain variable region sequence which is at least 85%, 90%, 95%, 98%, or 99% identical to the amino acid sequence of SEQ ID NO: 1490.

[0299] In various embodiments, the antibody or antigen binding fragment thereof comprises a heavy chain variable region sequence comprising the amino acid sequence of SEQ ID NO: 1495; or comprises a heavy chain variable region sequence which is at least 85%, 90%, 95%, 98%, or 99% identical to the amino acid sequence of SEQ ID NO: 1495.

[0300] In various embodiments, the antibody or antigen binding fragment thereof comprises a light chain variable region sequence comprising the amino acid sequence of SEQ ID NO: 1500; or comprises a light chain variable region sequence which is at least 85%, 90%, 95%, 98%, or 99% identical to the amino acid sequence of SEQ ID NO: 1500.

[0301] In various embodiments, the antibody or antigen binding fragment thereof comprises a heavy chain variable region sequence comprising the amino acid sequence of SEQ ID NO: 1505; or comprises a heavy chain variable region sequence which is at least 85%, 90%, 95%, 98%, or 99% identical to the amino acid sequence of SEQ ID NO: 1505.

[0302] In various embodiments, the antibody or antigen binding fragment thereof comprises a light chain variable region sequence comprising the amino acid sequence of SEQ ID NO: 1510; or comprises a light chain variable region sequence which is at least 85%, 90%, 95%, 98%, or 99% identical to the amino acid sequence of SEQ ID NO: 1510.

[0303] In various embodiments, the antibody or antigen binding fragment thereof comprises a heavy chain variable region sequence comprising the amino acid sequence of SEQ ID NO: 1515; or comprises a heavy chain variable region sequence which is at least 85%, 90%, 95%, 98%, or 99% identical to the amino acid sequence of SEQ ID NO: 1515.

[0304] In various embodiments, the antibody or antigen binding fragment thereof comprises a light chain variable region sequence comprising the amino acid sequence of SEQ ID NO: 1520; or comprises a light chain variable region sequence which is at least 85%, 90%, 95%, 98%, or 99% identical to the amino acid sequence of SEQ ID NO: 1520.

[0305] In various embodiments, the antibody or antigen binding fragment thereof comprises a heavy chain variable region sequence comprising the amino acid sequence of SEQ ID NO: 1525; or comprises a heavy chain variable region sequence which is at least 85%, 90%, 95%, 98%, or 99% identical to the amino acid sequence of SEQ ID NO: 1525.

[0306] In various embodiments, the antibody or antigen binding fragment thereof comprises a light chain variable region sequence comprising the amino acid sequence of SEQ ID NO: 1530; or comprises a light chain variable region sequence which is at least 85%, 90%, 95%, 98%, or 99% identical to the amino acid sequence of SEQ ID NO: 1530.

[0307] In various embodiments, the antibody or antigen binding fragment thereof comprises a heavy chain variable region sequence comprising the amino acid sequence of SEQ ID NO: 1535; or comprises a heavy chain variable region sequence which is at least 85%, 90%, 95%, 98%, or 99% identical to the amino acid sequence of SEQ ID NO: 1535.

[0308] In various embodiments, the antibody or antigen binding fragment thereof comprises a light chain variable region sequence comprising the amino acid sequence of SEQ ID NO: 1540; or comprises a light chain variable region sequence which is at least 85%, 90%, 95%, 98%, or 99% identical to the amino acid sequence of SEQ ID NO: 1540.

[0309] In various embodiments, the antibody or antigen binding fragment thereof comprises a heavy chain variable region sequence comprising the amino acid sequence of SEQ ID NO: 1545; or comprises a heavy chain variable region sequence which is at least 85%, 90%, 95%, 98%, or 99% identical to the amino acid sequence of SEQ ID NO: 1545.

[0310] In various embodiments, the antibody or antigen binding fragment thereof comprises a light chain variable region sequence comprising the amino acid sequence of SEQ ID NO: 1550; or comprises a light chain variable region sequence which is at least 85%, 90%, 95%, 98%, or 99% identical to the amino acid sequence of SEQ ID NO: 1550.

[0311] In various embodiments, the antibody or antigen binding fragment thereof comprises a heavy chain variable region sequence comprising the amino acid sequence of SEQ ID NO: 1555; or comprises a heavy chain variable region sequence which is at least 85%, 90%, 95%, 98%, or 99% identical to the amino acid sequence of SEQ ID NO: 1555.

[0312] In various embodiments, the antibody or antigen binding fragment thereof comprises a light chain variable region sequence comprising the amino acid sequence of SEQ ID NO: 1560; or comprises a light chain variable region sequence which is at least 85%, 90%, 95%, 98%, or 99% identical to the amino acid sequence of SEQ ID NO: 1560.

[0313] In various embodiments, the antibody or antigen binding fragment thereof comprises heavy and light chain variable region sequences which are selected from the group consisting of: (1) SEQ ID NOs: 1295 and 1300, respectively, (2) SEQ ID NOs: 1305 and 1310, respectively, (3) SEQ ID NOs: 1315 and 1320, respectively; (4) SEQ ID NOs: 1325 and 1330, respectively; (5) SEQ ID NOs: 1335 and 1340, respectively; (6) SEQ ID NOs: 1345 and 1350, respectively; (7) SEQ ID NOs: 1355 and 1360, respectively; (8) SEQ ID NOs: 1365 and 1370, respectively; (9) SEQ ID NOs: 1375 and 1380, respectively; (10) SEQ ID NOs: 1385 and 1390, respectively; (11) SEQ ID NOs: 1395 and 1400, respectively; (12) SEQ ID NOs: 1405 and 1410, respectively; (13) SEQ ID NOs: 1415 and 1420, respectively; (14) SEQ ID NOs: 1425 and 1430, respectively; (15) SEQ ID NOs: 1435 and 1440, respectively; (16) SEQ ID NOs: 1445 and 1450, respectively; (17) SEQ ID NOs: 1455 and 1460, respectively; (18) SEQ ID NOs: 1465 and 1470, respectively; (19) SEQ ID NOs: 1475 and 1480, respectively; (20) SEQ ID NOs: 1485 and 1490, respectively; (21) SEQ ID NOs: 1495 and 1500, respectively; (22) SEQ ID NOs: 1505 and 1510, respectively; (23) SEQ ID NOs: 1515 and 1520, respectively; (24) SEQ ID NOs: 1525 and 1530, respectively; (25) SEQ ID NOs: 1535 and 1540, respectively; (26) SEQ ID NOs: 1545 and 1550, respectively; and (27) SEQ ID NOs: 1555 and 1560, respectively.

[0314] In various embodiments, the antibody or antigen binding fragment thereof comprises heavy and light chain variable region sequences which are at least 85%, 90%, 95%, 98%, or 99% identical to the amino acid sequences selected from the group consisting of: (1) SEQ ID NOs: 1295 and 1300, respectively, (2) SEQ ID NOs: 1305 and 1310, respectively, (3) SEQ ID NOs: 1315 and 1320, respectively; (4) SEQ ID NOs: 1325 and 1330, respectively; (5) SEQ ID NOs: 1335 and 1340, respectively; (6) SEQ ID NOs: 1345 and 1350, respectively; (7) SEQ ID NOs: 1355 and 1360, respectively; (8) SEQ ID NOs: 1365 and 1370, respectively; (9) SEQ ID NOs: 1375 and 1380, respectively; (10) SEQ ID NOs: 1385 and 1390, respectively; (11) SEQ ID NOs: 1395 and 1400, respectively; (12) SEQ ID NOs: 1405 and 1410, respectively; (13) SEQ ID NOs: 1415 and 1420, respectively; (14) SEQ ID NOs: 1425 and 1430, respectively; (15) SEQ ID NOs: 1435 and 1440, respectively; (16) SEQ ID NOs: 1445 and 1450, respectively; (17) SEQ ID NOs: 1455 and 1460, respectively; (18) SEQ ID NOs: 1465 and 1470, respectively; (19) SEQ ID NOs: 1475 and 1480, respectively; (20) SEQ ID NOs: 1485 and 1490, respectively; (21) SEQ ID NOs: 1495 and 1500, respectively; (22) SEQ ID NOs: 1505 and 1510, respectively; (23) SEQ ID NOs: 1515 and 1520, respectively; (24) SEQ ID NOs: 1525 and 1530, respectively; (25) SEQ ID NOs: 1535 and 1540, respectively; (26) SEQ ID NOs: 1545 and 1550, respectively; and (27) SEQ ID NOs: 1555 and 1560, respectively.

[0315] In various embodiments, the antibody or antigen binding fragment thereof comprises heavy and light chain variable region sequences which are selected from the group consisting of: (1) SEQ ID NOs: 2589 and 2604; (2) SEQ ID NOs:2590 and 2605; (3) SEQ ID NOs: 2591 and 2606; (4) SEQ ID NOs:2592 and 2607; (5) SEQ ID NOs: 2593 and 2608; (6) SEQ ID NOs: 2594 and 2609; (7) SEQ ID NOs: 2595 and 2610; (8) SEQ ID NOs: 2596 and 2611; (9) SEQ ID NOs: 2597 and 2612; (10) SEQ ID NOs: 2598 and 2613; (11) SEQ ID NOs: 2599 and 2614; (12) SEQ ID NOs: 2600 and 2615; (13) SEQ ID NOs: 2601 and 2616; (14) SEQ ID NOs: 2602 and 2617; and (15) SEQ ID NOs: 2603 and 2618.

[0316] In various embodiments, the antibody or antigen binding fragment thereof comprises a heavy chain sequence and light chain sequence which is at least 85%, 90%, 95%, 98%, or 99% identical to the amino acid sequences selected from the group consisting of: (1) SEQ ID NOs: 2589 and 2604; (2) SEQ ID NOs:2590 and 2605; (3) SEQ ID NOs: 2591 and 2606; (4) SEQ ID NOs:2592 and 2607; (5) SEQ ID NOs: 2593 and 2608; (6) SEQ ID NOs: 2594 and 2609; (7) SEQ ID NOs: 2595 and 2610; (8) SEQ ID NOs: 2596 and 2611; (9) SEQ ID NOs: 2597 and 2612; (10) SEQ ID NOs: 2598 and 2613; (11) SEQ ID NOs: 2599 and 2614; (12) SEQ ID NOs: 2600 and 2615; (13) SEQ ID NOs: 2601 and 2616; (14) SEQ ID NOs: 2602 and 2617; and (15) SEQ ID NOs: 2603 and 2618.

[0317] In various embodiments, the antibody or antigen binding fragment thereof comprises a heavy chain selected from the group consisting of: SEQ ID NOs. 47, 52, 57, 62, 67, 72, 77, 82, 87, and 92; and which comprises a light chain sequence selected from the group consisting of: SEQ ID NOs. 12, 17, 22, 27, 32, 37, and 42.

[0318] In various embodiments, the antibody or antigen binding fragment thereof comprises a heavy chain sequence which is at least 85%, 90%, 95%, 98%, or 99% identical to the amino acid sequences selected from the group consisting of: SEQ ID NOs. 47, 52, 57, 62, 67, 72, 77, 82, 87, and 92; and which comprises a light chain sequence which is at least 85%, 90%, 95%, 98%, or 99% identical to the amino acid sequences selected from the group consisting of: SEQ ID NOs. 12, 17, 22, 27, 32, 37, and 42.

[0319] In various embodiments, the antibody or antigen binding fragment thereof comprises a heavy chain and light chain selected from the group consisting of: (1) SEQ ID NOs: 99 and 104, respectively, (2) SEQ ID NOs: 109 and 114, respectively, (3) SEQ ID NOs: 119 and 124, respectively; (4) SEQ ID NOs: 129 and 134, respectively; (5) SEQ ID NOs: 139 and 144, respectively; (6) SEQ ID NOs: 149 and 154, respectively; (7) SEQ ID NOs: 159 and 164, respectively; (8) SEQ ID NOs: 169 and 174, respectively; (9) SEQ ID NOs: 179 and 184, respectively; (10) SEQ ID NOs: 189 and 194, respectively; (11) SEQ ID NOs: 199 and 204, respectively; (12) SEQ ID NOs: 209 and 214, respectively; (13) SEQ ID NOs: 219 and 224, respectively; (14) SEQ ID NOs: 229 and 234, respectively; (15) SEQ ID NOs: 239 and 244, respectively; (16) SEQ ID NOs: 249 and 254, respectively; (17) SEQ ID NOs: 259 and 264, respectively; (18) SEQ ID NOs: 269 and 274, respectively; (19) SEQ ID NOs: 279 and 284, respectively; (20) SEQ ID NOs: 289 and 294, respectively; (21) SEQ ID NOs: 299 and 304, respectively; (22) SEQ ID NOs: 309 and 314, respectively; (23) SEQ ID NOs: 319 and 324, respectively; (24) SEQ ID NOs: 329 and 334, respectively; (25) SEQ ID NOs: 339 and 344, respectively; (26) SEQ ID NOs: 349 and 354, respectively; (27) SEQ ID NOs: 359 and 364, respectively; (28) SEQ ID NOs: 369 and 374, respectively; (29) SEQ ID NOs: 379 and 384, respectively; (30) SEQ ID NOs: 389 and 394, respectively; (31) SEQ ID NOs: 399 and 404, respectively; (32) SEQ ID NOs: 409 and 414, respectively; (33) SEQ ID NOs: 419 and 424, respectively; (34) SEQ ID NOs: 429 and 434, respectively; (35) SEQ ID NOs: 439 and 444, respectively; (36) SEQ ID NOs: 459 and 464, respectively; (37) SEQ ID NOs: 469 and 474, respectively; (38) SEQ ID NOs: 479 and 484, respectively; (39) SEQ ID NOs: 489 and 494, respectively; (40) SEQ ID NOs: 499 and 504, respectively; (41) SEQ ID NOs: 509 and 514, respectively; (42) SEQ ID NOs: 519 and 524, respectively; (43) SEQ ID NOs: 529 and 534, respectively; and (44) SEQ ID NOs: 539 and 544, respectively.

[0320] In various embodiments, the antibody or antigen binding fragment thereof comprises heavy and light chain sequences which are at least 85%, 90%, 95%, 98%, or 99% identical to the amino acid sequences selected from the group consisting of: (1) SEQ ID NOs: 99 and 104, respectively, (2) SEQ ID NOs: 109 and 114, respectively, (3) SEQ ID NOs: 119 and 124, respectively; (4) SEQ ID NOs: 129 and 134, respectively; (5) SEQ ID NOs: 139 and 144, respectively; (6) SEQ ID NOs: 149 and 154, respectively; (7) SEQ ID NOs: 159 and 164, respectively; (8) SEQ ID NOs: 169 and 174, respectively; (9) SEQ ID NOs: 179 and 184, respectively; (10) SEQ ID NOs: 189 and 194, respectively; (11) SEQ ID NOs: 199 and 204, respectively; (12) SEQ ID NOs: 209 and 214, respectively; (13) SEQ ID NOs: 219 and 224, respectively; (14) SEQ ID NOs: 229 and 234, respectively; (15) SEQ ID NOs: 239 and 244, respectively; (16) SEQ ID NOs: 249 and 254, respectively; (17) SEQ ID NOs: 259 and 264, respectively; (18) SEQ ID NOs: 269 and 274, respectively; (19) SEQ ID NOs: 279 and 284, respectively; (20) SEQ ID NOs: 289 and 294, respectively; (21) SEQ ID NOs: 299 and 304, respectively; (22) SEQ ID NOs: 309 and 314, respectively; (23) SEQ ID NOs: 319 and 324, respectively; (24) SEQ ID NOs: 329 and 334, respectively; (25) SEQ ID NOs: 339 and 344, respectively; (26) SEQ ID NOs: 349 and 354, respectively; (27) SEQ ID NOs: 359 and 364, respectively; (28) SEQ ID NOs: 369 and 374, respectively; (29) SEQ ID NOs: 379 and 384, respectively; (30) SEQ ID NOs: 389 and 394, respectively; (31) SEQ ID NOs: 399 and 404, respectively; (32) SEQ ID NOs: 409 and 414, respectively; (33) SEQ ID NOs: 419 and 424, respectively; (34) SEQ ID NOs: 429 and 434, respectively; (35) SEQ ID NOs: 439 and 444, respectively; (36) SEQ ID NOs: 459 and 464, respectively; (37) SEQ ID NOs: 469 and 474, respectively; (38) SEQ ID NOs: 479 and 484, respectively; (39) SEQ ID NOs: 489 and 494, respectively; (40) SEQ ID NOs: 499 and 504, respectively; (41) SEQ ID NOs: 509 and 514, respectively; (42) SEQ ID NOs: 519 and 524, respectively; (43) SEQ ID NOs: 529 and 534, respectively; and (44) SEQ ID NOs: 539 and 544, respectively.

[0321] In various embodiments, the antibody or antigen binding fragment thereof comprises a heavy chain and a light chain selected from the group consisting of: SEQ ID NOs: 549 and 554, respectively, (2) SEQ ID NOs: 559 and 564, respectively, and SEQ ID NOs: 569 and 574, respectively.

[0322] In various embodiments, the antibody or antigen binding fragment thereof comprises heavy and light chain variable region sequences which are at least 85%, 90%, 95%, 98%, or 99% identical to the amino acid sequences selected from the group consisting of: SEQ ID NOs: 549 and 554, respectively, (2) SEQ ID NOs: 559 and 564, respectively, and SEQ ID NOs: 569 and 574, respectively.

[0323] In various embodiments, the antibody or antigen binding fragment thereof comprises a heavy chain and a light chain selected from the group consisting of: SEQ ID NO: (1) SEQ ID NOs: 1296 and 1301, respectively, (2) SEQ ID NOs: 1306 and 1311, respectively, (3) SEQ ID NOs: 1316 and 1321, respectively; (4) SEQ ID NOs: 1326 and 1331, respectively; (5) SEQ ID NOs: 1336 and 1341, respectively; (6) SEQ ID NOs: 1346 and 1351, respectively; (7) SEQ ID NOs: 1356 and 1361, respectively; (8) SEQ ID NOs: 1366 and 1371, respectively; (9) SEQ ID NOs: 1376 and 1381, respectively; (10) SEQ ID NOs: 1386 and 1391, respectively; (11) SEQ ID NOs: 1396 and 1401, respectively; (12) SEQ ID NOs: 1406 and 1411, respectively; (13) SEQ ID NOs: 1416 and 1421, respectively; (14) SEQ ID NOs: 1426 and 1431, respectively; (15) SEQ ID NOs: 1436 and 1441, respectively; (16) SEQ ID NOs: 1446 and 1451, respectively; (17) SEQ ID NOs: 1456 and 1461, respectively; (18) SEQ ID NOs: 1466 and 1471, respectively; (19) SEQ ID NOs: 1476 and 1481, respectively; (20) SEQ ID NOs: 1486 and 1491, respectively; (21) SEQ ID NOs: 1496 and 1501, respectively; (22) SEQ ID NOs: 1506 and 1511, respectively; (23) SEQ ID NOs: 1516 and 1521, respectively; (24) SEQ ID NOs: 1526 and 1531, respectively; (25) SEQ ID NOs: 1536 and 1541, respectively; (26) SEQ ID NOs: 1546 and 1551, respectively; and (27) SEQ ID NOs: 1556 and 1561, respectively.

[0324] In various embodiments, the antibody or antigen binding fragment thereof comprises heavy and light chain variable region sequences which are at least 85%, 90%, 95%, 98%, or 99% identical to the amino acid sequences selected from the group consisting of: (1) SEQ ID NOs: 1296 and 1301, respectively, (2) SEQ ID NOs: 1306 and 1311, respectively, (3) SEQ ID NOs: 1316 and 1321, respectively; (4) SEQ ID NOs: 1326 and 1331, respectively; (5) SEQ ID NOs: 1336 and 1341, respectively; (6) SEQ ID NOs: 1346 and 1351, respectively; (7) SEQ ID NOs: 1356 and 1361, respectively; (8) SEQ ID NOs: 1366 and 1371, respectively; (9) SEQ ID NOs: 1376 and 1381, respectively; (10) SEQ ID NOs: 1386 and 1391, respectively; (11) SEQ ID NOs: 1396 and 1401, respectively; (12) SEQ ID NOs: 1406 and 1411, respectively; (13) SEQ ID NOs: 1416 and 1421, respectively; (14) SEQ ID NOs: 1426 and 1431, respectively; (15) SEQ ID NOs: 1436 and 1441, respectively; (16) SEQ ID NOs: 1446 and 1451, respectively; (17) SEQ ID NOs: 1456 and 1461, respectively; (18) SEQ ID NOs: 1466 and 1471, respectively; (19) SEQ ID NOs: 1476 and 1481, respectively; (20) SEQ ID NOs: 1486 and 1491, respectively; (21) SEQ ID NOs: 1496 and 1501, respectively; (22) SEQ ID NOs: 1506 and 1511, respectively; (23) SEQ ID NOs: 1516 and 1521, respectively; (24) SEQ ID NOs: 1526 and 1531, respectively; (25) SEQ ID NOs: 1536 and 1541, respectively; (26) SEQ ID NOs: 1546 and 1551, respectively; and (27) SEQ ID NOs: 1556 and 1561, respectively.

[0325] In various embodiments, the antibody or antigen binding fragment thereof comprises a heavy chain variable region sequence comprising an amino acid sequence of SEQ ID NO: 2217, or a heavy chain variable region sequence which is at least 85%, 90%, 95%, 98%, or 99% identical to the amino acid sequence of SEQ ID NO: 2217.

[0326] In various embodiments, the antibody or antigen binding fragment thereof comprises a light chain variable region sequence comprising an amino acid sequence of SEQ ID NO: 2221, or a heavy chain variable region sequence which is at least 85%, 90%, 95%, 98%, or 99% identical to the amino acid sequence of SEQ ID NO: 2221.

[0327] In various embodiments, the antibody or antigen binding fragment thereof comprises a heavy chain variable region sequence comprising an amino acid sequence of SEQ ID NO: 2217, and comprises a light chain variable region sequence comprising an amino acid sequence of SEQ ID NO: 2221.

[0328] In various embodiments, the antibody or antigen binding fragment thereof comprises a heavy chain and light chain sequences selected from the group consisting of: SEQ ID NOs: 2619 and 2634, respectively, (2) SEQ ID NOs: 2620 and 2635, respectively, (3) SEQ ID NOs: 2621 and 2636, respectively; (4). SEQ ID NOs: 2622 and 2637; (5) SEQ ID NOs: 2623 and 2638; (6) SEQ ID NOs: 2624 and 2639; (7) SEQ ID NOs: 2625 and 2640; (8) SEQ ID NOs: 2626 and 2641; (9) SEQ ID NOs: 2627 and 2642; (10) SEQ ID NOs: 2628 and 2643; (11) SEQ ID NOs: 2629 and 2644; (12) SEQ ID NOs: 2630 and 2645; (13) SEQ ID NOs: 2631 and 2646; (14) SEQ ID NOs: 2632 and 2647; and (15) SEQ ID NOs: 2633 and 2648.

[0329] In various embodiments, the antibody or antigen binding fragment thereof comprises heavy and light chain sequences which are at least 85%, 90%, 95%, 98%, or 99% identical to the amino acid sequences selected from the group consisting of: SEQ ID NOs: 2619 and 2634, respectively, (2) SEQ ID NOs: 2620 and 2635, respectively, (3) SEQ ID NOs: 2621 and 2636, respectively; (4). SEQ ID NOs: 2622 and 2637; (5) SEQ ID NOs: 2623 and 2638; (6) SEQ ID NOs: 2624 and 2639; (7) SEQ ID NOs: 2625 and 2640; (8) SEQ ID NOs: 2626 and 2641; (9) SEQ ID NOs: 2627 and 2642; (10) SEQ ID NOs: 2628 and 2643; (11) SEQ ID NOs: 2629 and 2644; (12) SEQ ID NOs: 2630 and 2645; (13) SEQ ID NOs: 2631 and 2646; (14) SEQ ID NOs: 2632 and 2647; and (15) SEQ ID NOs: 2633 and 2648.

[0330] In various embodiments, the antibody or antigen binding fragment thereof comprises at least one conservative sequence modification, substitution, or deletion.

[0331] In various embodiments, the antibody or antigen binding fragment thereof binds to human LAP.

[0332] In various embodiments, the antibody or antigen binding fragment thereof binding to a complex comprising LAP/TGFβ1.

[0333] In various embodiments, the antibody or antigen binding fragment inhibits TGFβ1 activation.

[0334] In various embodiments, the antibody or antigen binding fragment thereof of any of the preceding claims binds to LAP (e.g., human LAP) and/or to a complex comprising LAP/TGFβ1 with a K_{D} as described herein, for example, in Table 44. In various embodiments, the antibody or antigen binding fragment thereof of any of the preceding claims binds to LAP (e.g., human LAP) and/or to a complex comprising LAP/TGFβ1 with a K_{D} of 30 nanomolar (nM) or less, 20 nM or less, 10 nM or less, 1 nM or less, 0.9 nM or less, 0.8 nM or less, 0.7 nM or less, 0.6 nM or less, 0.5 nM or less, 0.4 nM or less, 0.3 nM or less, 0.2 nM or less, 0.1 nM or less, 0.09 nM or less, 0.08 nM or less, 0.07 nM or less, 0.06 nM or less, 0.05 nM or less, 0.04 nM or less, 0.03 nM or less, 0.02 nM or less, 10 picomolar (pM) or less, 9 pM or less, 8 pM or less, or 7 nM or less.

[0335] In various embodiments, the antibody or antigen binding fragment thereof binds to LAP complexed with an anchor protein on immunosuppressive cells, but does not bind to the anchor protein or to an epitope composed of residues of both LAP and the anchor protein. For example, the anchor protein is GARP or LRRC33. In various embodiments, the immunosuppressive cells are regulatory T cells, M2 macrophages, cancer cells expressing LAP, and/or myeloid-derived suppressor cells.

[0336] In various embodiments, the antibody or antigen binding fragment binds to both a GARP-positive immunosuppressive cell and a GARP-negative immunosuppressive cell.

[0337] In various embodiments, the antibody or antigen binding fragment does not bind to LAP on extracellular matrix.

[0338] In various embodiments, the antibody or antigen binding fragment does not bind to LAP complexed with LTBP1, LTBP3 and/or LTBP4.

[0339] In various embodiments, the antibody comprises an IgG constant region or variant thereof. For example, the antibody comprises an IgG1 constant domain or variant thereof. In various embodiments, the antibody comprises a constant domain shown in a Table herein. For example, the antibody comprises a human_IgG1_L234A_L235A as described below:

Human IgG1_P01857_L234A_L235A
(SEQ ID NO: 2225)
ASTKGPSVFPLAPSSKSTSGGTAALGCLVKDYFPEPVTVS
WNSGALTSGVHTFPAVLQSSGLYSLSSVVTVPSSSLGTQT
YICNVNHKPSNTKVDKKVEPKSCDKTHTCPPCPAPEaaGG
PSVFLFPPKPKDTLMISRTPEVTCVVVDVSHEDPEVKFNW
YVDGVEVHNAKTKPREEQYNSTYRVVSVLTVLHQDWLNGK
EYKCKVSNKALPAPIEKTISKAKGQPREPQVYTLPPSRDE
LTKNQVSLTCLVKGFYPSDIAVEWESNGQPENNYKTTPPV
LDSDGSFFLYSKLTVDKSRWQQGNVFSCSVMHEALHNHYT
QKSLSLSPGK

[0340] For example, the antibody comprises a human_IgG1_L234A_L235A_D265S as described below:

Human IgG1_P01857_L234A_L235A_D265S
(SEQ ID NO: 2226)
ASTKGPSVFPLAPSSKSTSGGTAALGCLVKDYFPEPVTVS
WNSGALTSGVHTFPAVLQSSGLYSLSSVVTVPSSSLGTQT
YICNVNHKPSNTKVDKKVEPKSCDKTHTCPPCPAPEaaGG
PSVFLFPPKPKDTLMISRTPEVTCVVVsVSHEDPEVKFNW
YVDGVEVHNAKTKPREEQYNSTYRVVSVLTVLHQDWLNGK
EYKCKVSNKALPAPIEKTISKAKGQPREPQVYTLPPSRDE
LTKNQVSLTCLVKGFYPSDIAVEWESNGQPENNYKTTPPV
LDSDGSFFLYSKLTVDKSRWQQGNVFSCSVMHEALHNHYT
QKSLSLSPGK

[0341] In various embodiments, the antibody comprises an IgG4 constant domain or variant thereof. In various embodiments, the antibody comprises a constant domain shown in a Table herein.

[0342] In various embodiments, the antibody is a chimeric, human or humanized antibody.

[0343] In various embodiments, the antibody or antigen binding fragment thereof binds to the same epitope on LAP as the antibody of any of claims described herein.

[0344] In various embodiments, the antibody or antigen binding fragment thereof binds to an epitope of LAP.

[0345] An aspect of the invention provides an antibody or antigen binding fragment thereof which binds to one or more residues of residues 31-40, 274-280, and 340-343 of human LAP-TGFβ1 (SEQ ID NO: 1), or binds to one or more residues of residues 31-43, 272-283, and 340-344 of human LAP-TGFβ1 (SEQ ID NO: 1). In various embodiments, the antibody or antigen binding fragment thereof binds to each of the residues 31-40, 274-280, and 340-343 of human LAP-TGFβ1 (SEQ ID NO: 1). In various embodiments, the antibody or antigen binding fragment thereof binds to one of the residues in the range of amino acid residues 31-40, 274-280, and 340-343 of human LAP-TGFβ1 (SEQ ID NO: 1). In various embodiments, the antibody or antigen binding fragment thereof binds to each of the residues 31-43, 272-283, and 340-344 of human LAP-TGFβ1 (SEQ ID NO: 1). In various embodiments, the antibody or antigen binding fragment thereof binds to one of the residues in the range of amino acid residues 31-43, 272-283, and 340-344 of human LAP-TGFβ1 (SEQ ID NO: 1). In various embodiments, the antibody is an isolated antibody or a monoclonal antibody.

[0346] An aspect of the invention provides a bispecific molecule comprising the antibody or antigen binding fragment thereof described herein linked to a molecule having a second binding region. In various embodiments, the antibody or antigen binding fragment thereof comprises an amino acid sequence described in Tables 4, 6, 8, 11-43 and 45.

[0347] In various embodiments, the second binding region binds to a tumor-associated antigen. For example, the second binding region binds to CD4, CD8, CD45, CD56, CD14, CD16, CD19, CD11b, CD25, CD20, CD22, CD30, CD38, CD114, CD23, CD73, CD163, CD206, CD203, CD200R, or CD39.

[0348] An aspect of the invention provides an immunoconjugate comprising the antibody or antigen binding fragment thereof described herein, linked to a detectable moiety, a binding moiety, a labeling moiety, or a biologically active moiety. In various embodiments, the antibody or antigen binding fragment thereof comprises an amino acid sequence described in Tables 4, 6, 8, 11-43 and 45.

[0349] An aspect of the invention provides a nucleic acid comprising a nucleotide sequence that encodes the heavy and/or light chain variable region of the antibody or antigen binding fragment thereof described herein. In various embodiments, the antibody or antigen binding fragment thereof comprises an amino acid sequence described in Tables 4, 6, 8, 11-43 and 45. An aspect of the invention provides an expression vector comprising the nucleic acid described herein.

[0350] An aspect of the invention provides a cell transformed with an expression vector described herein.

[0351] An aspect of the invention provides a pharmaceutical composition comprising the antibody or antigen binding fragment, bispecific molecule, or immunoconjugate described herein, and a pharmaceutically acceptable carrier. In various embodiments, the antibody or antigen binding fragment thereof comprises an amino acid sequence described in Tables 4, 6, 8, 11-43 and 45.

[0352] In various embodiments, the pharmaceutical composition further comprises one or more additional therapeutic agents. In various embodiments, the one or more additional therapeutic agents is selected from the group consisting of an anti-cancer agent, a chemotherapeutic agent, an immunosuppressive agent, an immunostimulatory agent, an anti-inflammatory agent, and an immune checkpoint inhibitor.

[0353] In various embodiments, the pharmaceutical composition further comprises an agent selected from the group consisting of:
[0354] a. an anti-PD1 antibody or an antigen binding fragment thereof,
[0355] b. an anti-LAG3 antibody or an antigen binding fragment thereof,
[0356] c. an anti-VISTA antibody or an antigen binding fragment thereof,
[0357] d. an anti-BTLA antibody or an antigen binding fragment thereof,
[0358] e. an anti-TIM3 antibody or an antigen binding fragment thereof,
[0359] f. an anti-CTLA4 antibody or an antigen binding fragment thereof,
[0360] g. an anti-HVEM antibody or an antigen binding fragment thereof,
[0361] h. an anti-CD27 antibody or an antigen binding fragment thereof,
[0362] i. an anti-CD137 antibody or an antigen binding fragment thereof,
[0363] j. an anti-OX40 antibody or an antigen binding fragment thereof,
[0364] k. an anti-CD28 antibody or an antigen binding fragment thereof,
[0365] l. an anti-PDL1 antibody or an antigen binding fragment thereof,
[0366] m. an anti-PDL2 antibody or an antigen binding fragment thereof,
[0367] n. an anti-GITR antibody or an antigen binding fragment thereof,
[0368] o. an anti-ICOS antibody or an antigen binding fragment thereof,
[0369] p. an anti-SIRPα antibody or an antigen binding fragment thereof,
[0370] q. an anti-ILT2 antibody or an antigen binding fragment thereof,
[0371] r. an anti-ILT3 antibody or an antigen binding fragment thereof,
[0372] s. an anti-ILT4 antibody or an antigen binding fragment thereof, and
[0373] t. an anti-ILT5 antibody or an antigen binding fragment thereof.

[0374] In various embodiments of the pharmaceutical composition, the anti-PD1 antibody or an antigen binding fragment thereof is selected from the group consisting of: pembrolizumab or an antigen binding fragment thereof and nivolumab or an antigen binding fragment thereof. For example, the anti-PD1 antibody is pembrolizumab. In various embodiments, the anti-PD-1 antibody is pembrolizumab comprising a heavy chain comprising the amino acid sequence of SEQ ID NO: 2213 and a light chain comprising the amino acid sequence of SEQ ID NO: 2214. In various embodiments, the anti-PD1 antibody is nivolumab. In various embodiments, the anti-PD-1 antibody is nivolumab comprising a heavy chain comprising the amino acid sequence of SEQ ID NO: 2215 and a light chain comprising the amino acid sequence of SEQ ID NO: 2216.

[0375] An aspect of the invention provides a kit comprising the antibody or antigen binding fragment thereof, bispecific molecule, or immunoconjugate described herein, and instructions for use. In various embodiments, the antibody or antigen binding fragment thereof comprises an amino acid sequence described in Tables 4, 6, 8, 11-43 and 45.

[0376] An aspect of the invention provides a method of producing an antibody or antigen binding fragment thereof comprising: culturing a host cell comprising a polynucleotide encoding the amino acid sequences of any one of the antibodies or antigen binding fragments described herein under conditions favorable to expression of the polynucleotide; and optionally, recovering the antibody or antigen binding fragment thereof from the host cell and/or culture medium. In various embodiments, the antibody or antigen binding fragment thereof comprises an amino acid sequence described herein, for example, in Tables 4, 6, 8, 11-43 and 45.

[0377] An aspect of the invention provides a method of selectively inhibiting TGFβ1 activation on cells expressing LAP, but not inhibiting TGFβ1 activation on extracellular matrix, comprising administering to a subject a therapeutically effective amount of the antibody or antigen binding fragment thereof, bispecific molecule, the immunoconjugate, or the pharmaceutical composition described herein. In various embodiments, the antibody or antigen binding fragment thereof comprises an amino acid sequence described herein, for example, in Tables 4, 6, 8, 11-43 and 45.

[0378] In various embodiments of the method, the cell is an immunosuppressive cell. In various embodiments, the immunosuppressive cell is selected from the group consisting of suppressive T cells, M2 macrophages, cancer cells expressing LAP-TGFβ1, and monocytic myeloid-derived suppressor cells.

[0379] An aspect of the invention provides a method of treating cancer comprising administering to a subject in need thereof a therapeutically effective amount the antibody or antigen binding fragment described herein. In various embodiments, the antibody or antigen binding fragment thereof comprises an amino acid sequence described herein, for example, in Tables 4, 6, 8, 11-43 and 45.

[0380] An aspect of the invention provides a method of treating cancer comprising administering to a subject in need thereof the antibody or antigen binding fragment thereof, the bispecific molecule, the immunoconjugate, or the pharmaceutical composition described herein. In various embodiments, the antibody or antigen binding fragment thereof comprises an amino acid sequence described herein, for example, in Tables 4, 6, 8, 11-43 and 45.

[0381] In various embodiments of the method, the cancer is characterized by abnormal TGFβ activity. In various embodiments of the method, the cancer is associated with infiltration of CD4+ regulatory T cells, CD8+ regulatory T cells, regulatory B cells, myeloid-derived suppressor cells, tumor-associated macrophages, cancer-associated fibroblasts, and/or innate lymphoid cells. In various embodiments of the method, the cancer is selected from the group consisting of: breast cancer, bladder cancer, uterine/cervical cancer, ovarian cancer, prostate cancer, testicular cancer, esophageal cancer, gastrointestinal cancer, pancreatic cancer, colorectal cancer, colon cancer, kidney cancer, head and neck cancer, lung cancer, stomach cancer, germ cell cancer, bone cancer, liver cancer, thyroid cancer, skin cancer, neoplasm of the central nervous system, lymphoma, leukemia, myeloma, sarcoma, and myelodysplastic syndromes.

[0382] In various embodiments, the method further comprises administering one or more additional therapies. For example, the one or more additional therapies is selected from radiation therapy, chemotherapy, an immune checkpoint inhibitor, immunosuppressive therapy, immunostimulatory therapy, cell therapy, and a therapeutic agent.

[0383] In various embodiments, the method further comprises administering an agent selected from the group consisting of:
[0384] a. an anti-PD1 antibody or an antigen binding fragment thereof,
[0385] b. an anti-LAG3 antibody or an antigen binding fragment thereof,
[0386] c. an anti-VISTA antibody or an antigen binding fragment thereof,
[0387] d. an anti-BTLA antibody or an antigen binding fragment thereof,
[0388] e. an anti-TIM3 antibody or an antigen binding fragment thereof,
[0389] f. an anti-CTLA4 antibody or an antigen binding fragment thereof,
[0390] g. an anti-HVEM antibody or an antigen binding fragment thereof,
[0391] h. an anti-CD27 antibody or an antigen binding fragment thereof,
[0392] i. an anti-CD137 antibody or an antigen binding fragment thereof,
[0393] j. an anti-OX40 antibody or an antigen binding fragment thereof,
[0394] k. an anti-CD28 antibody or an antigen binding fragment thereof,
[0395] l. an anti-PDL1 antibody or an antigen binding fragment thereof,
[0396] m. an anti-PDL2 antibody or an antigen binding fragment thereof,
[0397] n. an anti-GITR antibody or an antigen binding fragment thereof,
[0398] o. an anti-ICOS antibody or an antigen binding fragment thereof,
[0399] p. an anti-SIRPα antibody or an antigen binding fragment thereof,
[0400] q. an anti-ILT2 antibody or an antigen binding fragment thereof,
[0401] r. an anti-ILT3 antibody or an antigen binding fragment thereof,
[0402] s. an anti-ILT4 antibody or an antigen binding fragment thereof, and
[0403] t. an anti-ILT5 antibody or an antigen binding fragment thereof.

[0404] An aspect of the invention provides an antibody or antigen binding fragment thereof, the bispecific molecule, the immunoconjugate, or the pharmaceutical composition described herein, for use in the preparation of a medicament to:
[0405] increase immune cell activation;
[0406] treat cancer; or
[0407] treat an infection or infectious disease.

[0408] In various embodiments, the antibody or antigen binding fragment thereof comprises an amino acid sequence described herein, for example, in Tables 4, 6, 8, 11-43 and 45.

[0409] An aspect of the invention provides use of the antibody or antigen binding fragment thereof, the bispecific molecule, the immunoconjugate, or the pharmaceutical composition described herein for the manufacture of a medicament for: increasing immune cell activation; treating cancer; or treating an infection or infectious disease. In various embodiments, the antibody or antigen binding fragment thereof comprises an amino acid sequence described herein, for example, in Tables 4, 6, 8, 11-43 and 45.

[0410] An aspect of the invention provides a method of detecting the presence of LAP in a sample comprising contacting the sample with the antibody or antigen binding fragment thereof described herein, under conditions that allow for formation of a complex between the antibody and LAP, and detecting the formation of a complex. In various embodiments, the antibody or antigen binding fragment thereof comprises an amino acid sequence described herein, for example, in Tables 4, 6, 8, 11-43 and 45.

[0411] An aspect of the invention provides a method of diagnosing a cancer associated comprising contacting a biological sample from a patient afflicted with the cancer with the antibody or antigen binding fragment thereof described herein, wherein positive staining with the antibody indicates the cancer is associated with regulatory T cell infiltration. In various embodiments, the antibody or antigen binding fragment thereof comprises an amino acid sequence described herein, for example, in Tables 4, 6, 8, 11-43 and 45.

[0412] An aspect of the invention provides a method of diagnosing a cancer associated with GARP-negative suppressive cells comprising contacting a biological sample from a patient afflicted with the cancer with the antibody or antigen binding fragment thereof described herein, wherein positive staining with the antibody and negative staining with an anti-GARP antibody indicates the cancer is associated with GARP-negative suppressive cells. In various embodiments, the antibody or antigen binding fragment thereof comprises an amino acid sequence described herein, for example, in Tables 4, 6, 8, 11-43 and 45.

[0413] An aspect of the invention provides a method of selecting a patient afflicted with cancer for treatment with the antibody or antigen binding fragment thereof described herein, comprising contacting a biological sample from the patient with the antibody or antigen binding fragment, wherein positive staining with the antibody indicates the cancer is amenable to treatment with the antibody. In various embodiments, the antibody or antigen binding fragment thereof comprises an amino acid sequence described herein, for example, in Tables 4, 6, 8, 11-43 and 45.

[0414] An aspect of the invention provides a method of determining the response of a patient afflicted with cancer to treatment with the antibody or antigen binding fragment thereof described herein, comprising contacting a biological sample from the patient with the antibody or antigen binding fragment, wherein reduced staining with the antibody indicates the cancer is responding to treatment with the antibody. In various embodiments, the antibody or antigen binding fragment thereof comprises an amino acid sequence described herein, for example, in Tables 4, 6, 8, 11-43 and 45.

### BRIEF DESCRIPTION OF THE FIGURES

[0415] FIG. 1 is an amino acid sequence alignment showing the 20E6 tyrosine scanning variant designs. The 20E6 VL and VH sequences are shown in alignment with the 20E6 hybridoma antibody sequences and the human germline sequences IGKV1-33*01/IGJK2 and IGHG1-2*05/IGHJ4 used to humanize 20E6, respectively. The residue numbers shown on the top follow the Kabat numbering system and the CDR sequences are highlighted in bold and numbers underlined. The line ‘Tyrosine scan’ shows the CDR positions where each marked residue was changed into a Tyrosine as indicated by ‘Y’. Figure discloses SEQ ID NOS 2650-2651, 333, 2652-2653 and 98, respectively, in order of appearance.

[0416] FIG. 2 is an amino acid sequence alignment showing the 20E6 affinity maturation doping library designs. 20E6 VL and VH sequences are shown in alignment with the 20E6 hybridoma antibody sequences and the human germline sequences IGKV1-33*01/IGJK2 and IGHG1-2*05/IGHJ4 used to humanize 20E6, respectively. The residue numbers shown on the top follow the Kabat numbering system and the CDR sequences are highlighted in bold and numbers underlined. CDR residues that are within 5 Angstroms of LAP-TGFb1 in an Ag/Ab complex as shown by cryo-EM studies are identified by dashes. CDR residues that are chosen for sequence diversification by a 79-7-7-7 doping strategy during DNA synthesis are identified in the line ‘To diversify’ by the letter ‘Z’. The number 11 under LCDR2 indicates a paired sequence toggle between ET and HS in the library at equal ratio. Figure discloses SEQ ID NOS 2650-2651, 333, 2652-2653 and 98, respectively, in order of appearance.

[0417] FIG. 3 is an amino acid sequence alignment showing the 20E6 affinity maturation doping library designs. 20E6 VL and VH sequences are shown in alignment with the 20E6 hybridoma antibody sequences and the human germline sequences IGKV1-33*01/IGJK2 and IGHG1-2*05/IGHJ4 used to humanize 20E6, respectively. The residue numbers shown on the top follow the Kabat numbering system and the CDR sequences are highlighted in bold and numbers underlined. CDR residues that are within 5 Angstroms of LAP-TGFb1 in an Ag/Ab complex as shown by cryo-EM studies are identified by dashes. CDR residues that are chosen for sequence diversification by a 79-7-7-7 doping strategy during DNA synthesis are identified in the line ‘To diversify’ by the letter ‘Z’. CDR residues that are chosen for sequence diversification by synthesizing as 49% parental amino acid residue and 3% each of 17 A.A. (excluding M, C, W) using the TRIM technology are identified by the letter ‘X’. Figure discloses SEQ ID NOS 2650-2651, 333, 2652-2653 and 98, respectively, in order of appearance.

[0418] FIG. 4 A is a set visualization of the 20E6 Doping Library and sorting gates P4, P3, P2, and P1 after two-hour competition, and FIG. 4 B is a visualization of the sorting gate P1 after twelve-hour competition to obtain a wide range of improved affinities. APC: allophycocyanin, PE: phycoerythrin. APC-A=20E6 Doping Library expression on the yeast cell surface. PE-A=binding of 20E6 Doping Library to LAP/TGFb1-Fc.

[0419] FIG. 5 A is a visualization of the 20E6 TRIM Library and sorting gates P4, P3, P2, P1 after two-hour competition, and FIG. 5 B is a visualization of the sorting gate P1 after twelve-hour competition to obtain a wide range of improved affinities. APC: allophycocyanin, PE: phycoerythrin. APC-A=20E6 TRIM Library expression on the yeast cell surface. PE-A=binding of 20E6 TRIM Library to LAP/TGFb1-Fc FIG. 6 is a table with drawings of VH CDR sequence logos of 20E6 variants from the five different doping library outputs after the last round of off-rate selection. The numbers of sequences used to generate the sequence logos are shown below the sorting gates. The CDR residue numbers shown on the left are based on the Kabat numbering scheme.

[0420] FIG. 7 is a table with drawings of VL CDR sequence logos of 20E6 variants from the five different doping library outputs after the last round of off-rate selection. The numbers of sequences used to generate the sequence logos are shown below the sorting gates. The CDR residue numbers shown on the left are based on the Kabat numbering scheme.

[0421] FIG. 8 is a table with drawings of VH CDR sequence logos of 20E6 variants from the five different TRIM library outputs after the last round of off-rate selection. The numbers of sequences used to generate the sequence logos are shown below the sorting gates. The CDR residue numbers shown on the left are based on the Kabat numbering scheme.

[0422] FIG. 9 is a table with drawings of VL CDR sequence logos of 20E6 variants from the five different TRIM library outputs after the last round of off-rate selection. The numbers of sequences used to generate the sequence logos are shown below the sorting gates. The CDR residue numbers shown on the left are based on the Kabat numbering scheme.

[0423] FIG. 10 is a table with drawings of sequence logos of 432 VH and 457 VL CDRs from all doping and TRIM library selection outputs. The CDR residue numbers shown are based on the Kabat numbering scheme.

[0424] FIG. 11 is an affinity plot showing the association (kon) and dissociation (koff) relationships of 20E6 (♦) and variants (●) binding to human LAP-TGFβ1. The calculated KD, the equilibrium dissociation constant, is generated by dividing the koff/kon and results in a value with molar (M) units.

[0425] FIG. 12 is a binding response plot showing the observed constant binding partner (CBP) equilibrium response for each equilibrium series, 5 pM CBP (♦) and 100 pM CBP (●) and the fitted equilibrium curve for each series, 5 pM CBP ( [symbol] ) and 100 pM CBP ( [symbol] ).

[0426] FIG. 13 is a graph showing the inhibitory effects of parental 20E5 and selected affinity matured humanized antibodies on TGFβ1 activation in P3U1 cells expressing human LAP-TGFβ1.

[0427] FIG. 14 is a graph showing binding of anti-LAP/TGFβ1 parental humanized antibody and selected antibody candidates to tumor infiltrating immune cells. Fresh human tumors (8 kidneys and 1 lung) were dissociated and stained with either AF647-labeled isotype control antibody or one of seven AF647-labeled anti-LAP/TGFβ1 antibody candidates at the indicated concentrations. The samples were also stained with a cocktail of antibodies specific for various cell lineage markers to enable gating and identification of various immune populations by flow cytometry. Samples were analyzed using a Becton Dickinson Fortessa flow cytometer and data were analyzed using Flow Jo V10 software. Bars indicate average LAP+ cells expressed as a percent of intra-tumoral monocyte macrophages and error bars represent standard error of the average.

[0428] FIG. 15A, FIG. 15B, FIG. 15C, FIG. 15D, FIG. 15E, and FIG. 15F are a series of graphs showing the extent of binding to human RBCs, platelets and WBCs of different antibodies: affinity matured LAP-TGFB antibodies, parental 20E6 antibody, anti-RSV antibody, anti-integrin very late antigen (VLA)-4 antibody and anti-Her2 antibody. FIG. 15A is a graph showing percent AF647+ human RBCs from 2 donors after incubation with 10, 2, 0.2 and 0.02 ug/mL of labeled anti-LAP-TGFB antibodies, parental 20E6 antibody, anti-RSV antibody, anti-VLA-4 antibody and anti-Her2 antibody. FIG. 15B is a graph showing percent AF647+ human platelets from 2 donors after incubation with 10, 2, 0.2 and 0.02 ug/mL of labeled anti-LAP-TGFB antibodies, parental 20E6 antibody, anti-RSV antibody, anti-VLA-4 antibody and anti-Her2 antibody. FIG. 15C is a graph showing binding of 10 ug/mL of labeled anti-LAP-TGFB antibodies, parental 20E6 antibody, anti-RSV antibody, anti-VLA-4 antibody and anti-Her2 antibody (as % AF647+) to human CD20+ B cells. FIG. 15D is a graph showing binding of 10 ug/mL of labeled anti-LAP-TGFB antibodies, parental 20E6 antibody, anti-RSV antibody, anti-VLA-4 antibody and anti-Her2 antibody (as % AF647+) to human CD4+T and CD8+T cells. FIG. 15E is a graph showing binding of 10 ug/mL of labeled anti-LAP-TGFB antibodies, parental 20E6 antibody, anti-RSV antibody, anti-VLA-4 antibody and anti-Her2 antibody (as % AF647+) to human CD14+ monocytes. FIG. 15F is a graph showing binding of 10 ug/mL of labeled anti-LAP-TGFB antibodies, parental 20E6 antibody, anti-RSV antibody, anti-VLA-4 antibody and anti-Her2 antibody (as % AF647+) to human CD56+NK and granulocytes. Anti-VLA-4 antibody was utilized as a positive control antibody in FIG. 15C, FIG. 15D, FIG. 15E, and FIG. 15F.

[0429] FIG. 16A, FIG. 16B, FIG. 16C, FIG. 16D, FIG. 16E, and FIG. 16F are a series of graphs showing the extent of binding to rhesus RBCs, platelets and WBCs of different antibodies: affinity matured LAP-TGFB antibodies, parental 20E6 antibody, anti-RSV antibody, anti-VLA-4 antibody and anti-Her2 antibody. FIG. 16A is a graph showing percent AF647+ rhesus RBCs from 2 donors after incubation with 10, 2, 0.2 and 0.02 ug/mL of labeled anti-LAP-TGFB antibodies, parental 20E6 antibody, anti-RSV antibody, anti-VLA-4 antibody and anti-Her2 antibody. FIG. 16B is a graph showing percent AF647+ rhesus RBCs from 2 donors after incubation with 10, 2, 0.2 and 0.02 ug/mL of labeled anti-LAP-TGFB antibodies, parental 20E6 antibody, anti-RSV antibody, anti-VLA-4 antibody and anti-Her2 antibody. FIG. 16C is a graph showing binding of 10 ug/mL of labeled anti-LAP-TGFB antibodies, parental 20E6 antibody, anti-RSV antibody, anti-VLA-4 antibody and anti-Her2 antibody (as % AF647+) to rhesus CD20+ B cells. FIG. 16D is a graph showing binding of 10 ug/mL of labeled anti-LAP-TGFB antibodies, parental 20E6 antibody, anti-RSV antibody, anti-VLA-4 antibody and anti-Her2 antibody (as % AF647+) to rhesus CD4+T and CD8+T cells. FIG. 16E is a graph showing binding of 10 ug/mL of labeled anti-LAP-TGFB antibodies, parental 20E6 antibody, anti-RSV antibody, anti-VLA-4 antibody and anti-Her2 antibody (as % AF647+) to rhesus CD14+ monocytes. FIG. 16F is a graph showing binding of 10 ug/mL of labeled anti-LAP-TGFB antibodies, parental 20E6 antibody, anti-RSV antibody, anti-VLA-4 antibody and anti-Her2 antibody (as % AF647+) to rhesus NKG2A+NK and granulocytes. Natalizumab was utilized as a positive control antibody in FIG. 16C, FIG. 16D, FIG. 16E, and FIG. 16F.

[0430] FIG. 17A and FIG. 17B a series of graphs showing the extent of binding to hepatocytes treated with antibodies: affinity matured LAP-TGFB antibodies, parental 20E6 antibody, anti-RSV antibody, anti-VLA-4 antibody and anti-Her2 antibody. FIG. 17A is a graph showing percent AF647+ primary hepatocytes from 2 donors after incubation with 10 ug/mL of labeled anti-LAP-TGFB antibodies, parental 20E6 antibody, anti-RSV antibody, anti-VLA-4 antibody and anti-Her2 antibody compared to untreated control (APC FMO). FIG. 17B is a graph showing the mean fluorescent intensity (MFI) of AF647+ hepatocytes from 2 donors after incubation with 10 ug/mL of labeled anti-LAP-TGFB antibodies, parental 20E6 antibody, anti-RSV antibody, anti-VLA-4 antibody and anti-Her2 antibody compared to untreated allophycocyanin fluorescence-minus one (APC FMO) control.

[0431] FIG. 18A and FIG. 18B a series of graphs showing the extent of binding to hepatocytes treated with different antibodies: affinity matured LAP-TGFB antibodies, parental 20E6 antibody, anti-RSV antibody, anti-VLA-4 antibody and anti-Her2 antibody. FIG. 18A is a graph showing percent AF647+ primary keratinocytes from 4 donors after incubation with 10 ug/mL of labeled anti-LAP-TGFB antibodies, parental 20E6 antibody, anti-RSV antibody, anti-VLA-4 antibody and anti-Her2 antibody compared to untreated control (APC FMO). FIG. 18B is a graph showing the mean fluorescent intensity (MFI) of AF647+ keratinocytes from 4 donors after incubation with 10 ug/mL of labeled anti-LAP-TGFB antibodies, parental 20E6 antibody, anti-RSV antibody, anti-VLA-4 antibody and anti-Her2 antibody compared to untreated APC FMO control.

[0432] FIG. 19A is a graph showing percent of CD62P⁺ platelet activation for cells treated with different antibodies: affinity matured LAP-TGFB antibodies, parental 20E6 antibody, anti-RSV antibody, anti-VLA-4 antibody and anti-Her2 antibody. FIG. 19B is a graph showing percent of CD62P⁺ platelet activation of with anti-ADP antibody, anti-TRAP-6 antibody, anti-CD9 antibody, and anti-CD151 antibody.

[0433] FIG. 20A is a graph showing percent of PAC1⁺ platelet activation for cells treated with different antibodies: affinity matured LAP-TGFB antibodies, parental 20E6 antibody, anti-RSV antibody, anti-VLA-4 antibody and anti-Her2 antibody. FIG. 20B is a graph showing percent of PAC1⁺ platelet activation of with anti-ADP antibody, anti-TRAP-6 antibody, anti-CD9 antibody, and anti-CD151 antibody.

[0434] FIG. 21 is an affinity plot showing the association (kₒₙ) and dissociation (k_{off}) relationships of parental humanized 20E6 antibody (♦) and the yeast display mutants (●) binding to human LAP-TGFβ isoform 1. The calculated K_{D}, the equilibrium dissociation constant, was generated by dividing the k_{off}/kₒₙ and results in a value with molar (M) units.

[0435] FIG. 22A and FIG. 22B are graphs showing epitope binning for human LAP-TGFβ1 binding yeast display mutants 74BLH and 81BLH, respectively.

### DETAILED DESCRIPTION

### Definitions

[0436] “Abnormal” in the context of the activity, level or expression of a molecule means that the activity, level or expression is outside of the normal activity, level or expression for that molecule. “Normal” in the context of activity, level or expression refers to the range of activity, level or expression of the protein found in a population of healthy, gender- and age-matched subjects. The minimal size of this healthy population may be determined using standard statistical measures, e.g., the practitioner could take into account the incidence of the disease in the general population and the level of statistical certainty desired in the results.

[0437] As used herein, “Latency associated peptide” or “LAP” refers to the amino-terminal domain of the human TGFβ1 precursor peptide and has the amino acid sequence set forth in SEQ ID NO: 1562. “LAP-TGFβ1” and “LAP/TGFβ1” are used interchangeably herein to refer to the human TGFβ1 precursor peptide (which includes the TGFβ1 cytokine) and includes the amino acid sequence of SEQ ID NO: 1563 (see Uniprot sp|P01137|TGFB1_HUMAN with signal sequence removed).

human LAP-TGFB1
(SEQ ID NO: 1562)
LSTCKTIDMELVKRKRIEAIRGQILSKLRLASPPSQGEVP
PGPLPEAVLALYNSTRDRVAGESAEPEPEPEADYYAKEVT
RVLMVETHNEIYDKFKQSTHSIYMFFNTSELREAVPEPVL
LSRAELRLLRLKLKVEQHVELYQKYSNNSWRYLSNRLLAP
SDSPEWLSFDVTGVVRQWLSRGGEIEGFRLSAHCSCDSRD
NTLQVDINGFTTGRRGDLATIHGMNRPFLLLMATPLERAQ
HLQSSRHRRALDTNYCFSSTEKNCCVRQLYIDFRKDLGWK
WIHEPKGYHANFCLGPCPYIWSLDTQYSKVLALYNQHNPG
ASAAPCCVPQALEPLPIVYYVGRKPKVEQLSNMIVRSCKC
S
LAP region of human LAP-TGFB1
(SEQ ID NO: 1563)
LSTCKTIDMELVKRKRIEAIRGQILSKLRLASPPSQGEVP
PGPLPEAVLALYNSTRDRVAGESAEPEPEPEADYYAKEVT
RVLMVETHNEIYDKFKQSTHSIYMFFNTSELREAVPEPVL
LSRAELRLLRLKLKVEQHVELYQKYSNNSWRYLSNRLLAP
SDSPEWLSFDVTGVVRQWLSRGGEIEGFRLSAHCSCDSRD
NTLQVDINGFTTGRRGDLATIHGMNRPFLLLMATPLERAQ
HLQSSRHRR
human free TGFB1 (mature TGFB1 without LAP
(SEQ ID NO: 1564)
ALDTNYCFSSTEKNCCVRQLYIDFRKDLGWKWIHEPKGYH
ANFCLGPCPYIWSLDTQYSKVLALYNQHNPGASAAPCCVP
QALEPLPIVYYVGRKPKVEQLSNMIVRSCKCS

[0438] LAP can also refer to the amino-terminal domains of the human TGFβ2 precursor peptide and human TGFβ3 precursor peptide, as well as their counterparts from other species (e.g., mouse TGFβ1 precursor peptide and mouse LAP-TGFβ1: SEQ ID NO: 7, mouse TGFβ2 precursor peptide, and mouse TGFβ3 precursor peptide) and other naturally occurring allelic, splice variants, and processed forms thereof. See each of WO/2020/076969, WO/2016/115345 and WO/2019/075090, which are incorporated by reference in their entirety.

[0439] LAP is synthesized as a complex with TGFβ. LAP in the absence of mature TGFβ is referred to as “empty LAP.” Unless otherwise specified, “empty LAP” as used herein refers to LAP originating from the N-terminal domain of human TGFβ1. In addition to residues on LAP, the anti-LAP antibodies described herein may also bind to residues of mature TGFβ within the LAP-TGFβ1 complex. Notwithstanding, in all cases, the antibody at least binds to residues in the LAP portion of the LAP-TGFβ complex.

[0440] As used herein “free TGFβ1” refers to the mature TGFβ1 cytokine, i.e., TGFβ1 that is not complexed with LAP.

[0441] As used herein, “anchor protein” refers to a protein that anchors LAP-TGFβ to a cell surface or to the extracellular matrix. Exemplary anchor proteins include GARP, LRRC33, LTBP1, LTBP3, and LTBP4. GARP and LRRC33 are proteins that anchor LAP-TGFβ to the surface of cells, and LTBP1, LTBP3, and LTBP4 are proteins that anchor LAP-TGFβ to the extracellular matrix.

[0442] As used herein, the term “antibody” refers to any form of immunoglobulin molecule that exhibits the desired biological or binding activity. Thus, it is used in the broadest sense and specifically covers, but is not limited to, monoclonal antibodies (including full length monoclonal antibodies), polyclonal antibodies, multispecific antibodies (e.g., bispecific antibodies), humanized, fully human antibodies, and chimeric antibodies. “Parental antibodies” are antibodies obtained by exposure of an immune system to an antigen prior to modification of the antibodies for an intended use, such as humanization of an antibody for use as a human therapeutic. As used herein, the term “antibody” encompasses not only intact polyclonal or monoclonal antibodies, but also, unless otherwise specified, any antigen binding portion thereof that competes with the intact antibody for specific binding, fusion proteins comprising an antigen binding portion, and any other modified configuration of the immunoglobulin molecule that comprises an antigen recognition site.

[0443] In general, the basic antibody structural unit comprises a tetramer. Each tetramer includes two identical pairs of polypeptide chains, each pair having one “light” (about 25 kDa) and one “heavy” chain (about 50-70 kDa). The amino-terminal portion of each chain includes a variable region of about 100 to 110 or more amino acids primarily responsible for antigen recognition. The variable regions of each light/heavy chain pair form the antibody binding site. Thus, in general, an intact antibody has two binding sites. The carboxy-terminal portion of the heavy chain may define a constant region primarily responsible for effector function. Typically, human light chains are classified as kappa and lambda light chains. Furthermore, human heavy chains are typically classified as mu, delta, gamma, alpha, or epsilon, and define the antibody's isotype as IgM, IgD, IgG, IgA, and IgE, respectively. Within light and heavy chains, the variable and constant regions are joined by a “J” region of about 12 or more amino acids, with the heavy chain also including a “D” region of about 10 more amino acids. See generally, Fundamental Immunology Ch. 7 (Paul, W., ed., 2nd ed. Raven Press, N.Y. (1989).

[0444] As used herein, “isotype” refers to the antibody class (e.g., IgG1, IgG2, IgG3, IgG4, IgM, IgA1, IgA2, IgD, and IgE antibody) that is encoded by the heavy chain constant region genes.

Antibodies typically bind specifically to their cognate antigen with high affinity, reflected by a dissociation constant (K_{D}) of 10⁻⁵ to 10⁻¹² M or less. Any K_{D} greater than about 10⁻⁴ M is generally considered to indicate nonspecific binding. As used herein, an antibody that “binds specifically” to an antigen refers to an antibody that binds to the antigen and substantially identical antigens with high affinity, which means having a K_{D} of 10⁻⁷ M or less, preferably 10⁻⁸M or less, even more preferably 5×10⁻⁹ M or less, and most preferably between 10⁻⁸ M and 10⁻¹⁰M or less, but does not bind with high affinity to unrelated antigens.

[0445] As used herein, unless otherwise indicated, “antibody fragment” or “antigen binding fragment” or “antigen binding fragment thereof” refers to a fragment of an antibody that retains the ability to bind specifically to the antigen, e.g., fragments that retain one or more CDR regions. An antibody that “specifically binds to” PD-1, LAG3, or TIGIT is an antibody that exhibits preferential binding to PD-1, LAG3, or TIGIT (as appropriate) as compared to other proteins, but this specificity does not require absolute binding specificity. An antibody is considered “specific” for its intended target if its binding is determinative of the presence of the target protein in a sample, e.g., without producing undesired results such as false positives. Antibodies, or binding fragments thereof, will bind to the target protein with an affinity that is at least two-fold greater, preferably at least ten times greater, more preferably at least 20-times greater, and most preferably at least 100-times greater than the affinity with non-target proteins.

[0446] Antigen binding portions include, for example, Fab, Fab′, F(ab′)2, Fd, Fv, fragments including CDRs, and single chain variable fragment antibodies (scFv), and polypeptides that contain at least a portion of an immunoglobulin that is sufficient to confer specific antigen binding to the antibody (e.g., PD-1, LAG3, or TIGIT). An antibody includes an antibody of any class, such as IgG, IgA, or IgM (or sub-class thereof), and the antibody need not be of any particular class. Depending on the antibody amino acid sequence of the constant region of its heavy chains, immunoglobulins can be assigned to different classes. There are five major classes of immunoglobulins: IgA, IgD, IgE, IgG, and IgM, and several of these may be further divided into subclasses (isotypes), e.g., IgG1, IgG2, IgG3, IgG4, IgA1, and IgA2. The heavy-chain constant regions that correspond to the different classes of immunoglobulins are called alpha, delta, epsilon, gamma, and mu, respectively. The subunit structures and three-dimensional configurations of different classes of immunoglobulins are well known.

[0447] Antibody fragments within the scope of the present invention also include F(ab′)2 fragments which may be produced by enzymatic cleavage of an IgG by, for example, pepsin. Fab fragments may be produced by, for example, reduction of F(ab′)2 with dithiothreitol or mercaptoethylamine. A Fab fragment is a VL-CL chain appended to a VH-CH1 chain by a disulfide bridge. A F(ab′)2 fragment is two Fab fragments which, in turn, are appended by two disulfide bridges. The Fab portion of an F(ab′)2 molecule includes a portion of the Fc region between which disulfide bridges are located.

[0448] The term “acceptor human framework” refers to a framework comprising the amino acid sequence of a light chain variable domain (VL) framework or a heavy chain variable domain (VH) framework derived from a human immunoglobulin framework or a human consensus framework. An acceptor human framework “derived from” a human immunoglobulin framework or a human consensus framework may have the same amino acid sequence as the naturally-occurring human immunoglobulin framework or human consensus framework, or it may have amino acid sequence changes compared to wild-type naturally-occurring human immunoglobulin framework or human consensus framework. In some embodiments, the number of amino acid changes are 10, 9, 8, 7, 6, 5, 4, 3, or 2, or 1. In some embodiments, the VL acceptor human framework is identical in sequence to the VL human immunoglobulin framework sequence or human consensus framework sequence.

[0449] A “multispecific antibody” is an antibody (e.g., bispecific antibodies, tri-specific antibodies) that recognizes two or more different antigens or epitopes.

[0450] The term “binding protein” as used herein also refers to a non-naturally occurring (or recombinant) protein that specifically binds to at least one target antigen.

[0451] A “bispecific” or “bifunctional antibody” is an artificial hybrid antibody having two different heavy/light chain pairs and two different binding sites. Bispecific antibodies can be produced by a variety of methods including fusion of hybridomas or linking of Fab′ fragments. See, e.g., Songsivilai & Lachmann, Clin. Exp. Immunol. 79:315-321 (1990); Kostelny et al., J. Immunol. 148, 1547-1553 (1992). Bifunctional antibodies include, for example, heterodimeric antibody conjugates (e.g., two antibodies or antibody fragments joined together with each having different specificities), antibody/cell surface-binding molecule conjugates (e.g., an antibody conjugated to a non-antibody molecule such as a receptor), and hybrid antibodies (e.g., an antibody having binding sites for two different antigens).

[0452] The term “recombinant antibody,” refers to antibodies that are prepared, expressed, created or isolated by recombinant means, such as (a) antibodies isolated from an animal (e.g., a mouse) that is transgenic or transchromosomal for immunoglobulin genes (e.g., human immunoglobulin genes) or a hybridoma prepared therefrom, (b) antibodies isolated from a host cell transformed to express the antibody, e.g., from a transfectoma, (c) antibodies isolated from a recombinant, combinatorial antibody library (e.g., containing human antibody sequences) using phage display, and (d) antibodies prepared, expressed, created or isolated by any other means that involve splicing of immunoglobulin gene sequences (e.g., human immunoglobulin genes) to other DNA sequences. Such recombinant antibodies may have variable and constant regions derived from human germline immunoglobulin sequences. In certain embodiments, however, such recombinant human antibodies can be subjected to in vitro mutagenesis and thus the amino acid sequences of the VH and VL regions of the recombinant antibodies are sequences that, while derived from and related to human germline VH and VL sequences, may not naturally exist within the human antibody germline repertoire in vivo.

[0453] “Chimeric antibody” refers to an antibody in which a portion of the heavy and/or light chain contains sequences derived from a particular species (e.g., human) or belonging to a particular antibody class or subclass, while the remainder of the chain(s) is derived from another species (e.g., mouse) or belonging to another antibody class or subclass, as well as fragments of such antibodies, so long as they exhibit the desired biological activity.

[0454] “Human antibody” refers to an antibody that comprises human immunoglobulin protein sequences or derivatives thereof. A human antibody may contain murine carbohydrate chains if produced in a mouse, in a mouse cell, or in a hybridoma derived from a mouse cell. Similarly, “mouse antibody” or “rat antibody” refer to an antibody that comprises only mouse or rat immunoglobulin sequences or derivatives thereof, respectively.

[0455] “Humanized antibody” refers to forms of antibodies that contain sequences from non-human (e.g., murine) antibodies as well as human antibodies. Such antibodies contain minimal sequence derived from non-human immunoglobulin. In general, the humanized antibody will comprise substantially all of at least one, and typically two, variable domains, in which all or substantially all of the hypervariable loops correspond to those of a non-human immunoglobulin and all or substantially all of the FR regions are those of a human immunoglobulin sequence. The humanized antibody optionally also will comprise at least a portion of an immunoglobulin constant region (Fc), typically that of a human immunoglobulin. The prefix “hum”, “hu” or “h” may be added to antibody clone designations when necessary to distinguish humanized antibodies from parental rodent antibodies. The humanized forms of rodent antibodies will generally comprise the same CDR sequences of the parental rodent antibodies, although certain amino acid substitutions may be included to increase affinity, increase stability of the humanized antibody, or for other reasons.

[0456] “Monoclonal antibody” or “mAb” or “Mab”, as used herein, refers to a population of substantially homogeneous antibodies, i.e., the antibody molecules comprising the population are identical in amino acid sequence except for possible naturally occurring mutations that may be present in minor amounts. In contrast, conventional (polyclonal) antibody preparations typically include a multitude of different antibodies having different amino acid sequences in their variable domains, particularly their CDRs, which are often specific for different epitopes. The modifier “monoclonal” indicates the character of the antibody as being obtained from a substantially homogeneous population of antibodies, and is not to be construed as requiring production of the antibody by any particular method. For example, the monoclonal antibodies to be used in accordance with the present disclosure may be made by the hybridoma method first described by Kohler et al. (1975) Nature 256: 495, or may be made by recombinant DNA methods (see, e.g., U.S. Pat. No. 4,816,567). The “monoclonal antibodies” may also be isolated from phage antibody libraries using the techniques described in Clackson et al. (1991) Nature 352: 624-628 and Marks et al. (1991) J. Mol. Biol. 222: 581-597, for example. See also Presta (2005) J. Allergy Clin. Immunol. 116:731.

[0457] Antigen binding fragments (including scFvs) of such immunoglobulins are also encompassed by the term “monoclonal antibody” as used herein. Monoclonal antibodies are highly specific, being directed against a single antigenic site. Furthermore, in contrast to conventional (polyclonal) antibody preparations, which typically include different antibodies directed against different epitopes on the antigen, each monoclonal antibody is directed against a single epitope. Monoclonal antibodies can be prepared using any art recognized technique and those described herein such as, for example, a hybridoma method, a transgenic animal, recombinant DNA methods (see, e.g., U.S. Pat. No. 4,816,567), or using phage antibody libraries using the techniques described in, for example, U.S. Pat. No. 7,388,088 and PCT Pub. No. WO 00/31246). Monoclonal antibodies include chimeric antibodies, human antibodies, and humanized antibodies and may occur naturally or be produced recombinantly.

[0458] A “domain antibody” is an immunologically functional immunoglobulin fragment containing only the variable region of a heavy chain or the variable region of a light chain. In some instances, two or more VH regions are covalently joined with a peptide linker to create a bivalent domain antibody. The two VH regions of a bivalent domain antibody may target the same or different antigens.

[0459] A “bivalent antibody” comprises two antigen binding sites. In some instances, the two binding sites have the same antigen specificities. However, bivalent antibodies may be bispecific (see below).

[0460] As used herein, the term “single-chain Fv” or “scFv” antibody refers to antibody fragments comprising the VH and VL domains of antibody, wherein these domains are present in a single polypeptide chain. Generally, the Fv polypeptide further comprises a polypeptide linker. For a review of scFv, see Pluckthun (1994) THE PHARMACOLOGY OF MONOCLONAL ANTIBODIES, vol. 113, Rosenburg and Moore eds. Springer-Verlag, New York, pp. 269-315.

[0461] The monoclonal antibodies herein also include camelized single domain antibodies. See, e.g., Muyldermans et al. (2001) Trends Biochem. Sci. 26:230; Reichmann et al. (1999) J. Immunol. Methods 231:25; WO 94/04678; WO 94/25591; U.S. Pat. No. 6,005,079, which are hereby incorporated by reference in their entireties). In one embodiment, the present invention provides single domain antibodies comprising two VH domains with modifications such that single domain antibodies are formed.

[0462] As used herein, the term “diabodies” refers to small antibody fragments with two antigen binding sites, which fragments comprise a heavy chain variable domain (V_{H}) connected to a light chain variable domain (V_{L}) in the same polypeptide chain (V_{H}-V_{L} or V_{L}-V_{H}). By using a linker that is too short to allow pairing between the two domains on the same chain, the domains are forced to pair with the complementary domains of another chain and create two antigen binding sites. Diabodies are described more fully in, e.g., EP 404,097; WO 93/11161; and Holliger et al. (1993) Proc. Natl. Acad. Sci. USA 90: 6444-6448. For a review of engineered antibody variants generally see Holliger and Hudson (2005) Nat. Biotechnol. 23:1126-1136.

[0463] The antibodies of the present invention also include antibodies with modified (or blocked) Fc regions to provide altered effector functions. See, e.g., U.S. Pat. No. 5,624,821; WO2003/086310; WO2005/120571; WO2006/0057702; Presta (2006) Adv. Drug Delivery Rev. 58:640-656. Such modification can be used to enhance or suppress various reactions of the immune system, with possible beneficial effects in diagnosis and therapy. Alterations of the Fc region include amino acid changes, such as substitutions, deletions and insertions, glycosylation or deglycosylation, and adding multiple Fc. Changes to the Fc may be utilized to alter the half-life of antibodies in therapeutic antibodies, and a longer half-life would result in less frequent dosing, with the concomitant increased convenience and decreased use of material. See Presta (2005) J. Allergy Clin. Immunol. 116:731 at 734-35.

[0464] The term “fully human antibody” refers to an antibody that comprises human immunoglobulin protein sequences only. A fully human antibody may contain murine carbohydrate chains if produced in a mouse, in a mouse cell, or in a hybridoma derived from a mouse cell. Similarly, “mouse antibody” refers to an antibody which comprises mouse immunoglobulin sequences only.

[0465] “Variable regions” or “V region” or “V chain” as used herein means the segment of IgG chains which is variable in sequence between different antibodies. A “variable region” of an antibody refers to the variable region of the antibody light chain or the variable region of the antibody heavy chain, either alone or in combination. The variable region of the heavy chain may also be referred to as “heavy chain variable region”, “heavy chain variable domain”, “VH” or “V_{H}” in the instant disclosure. The variable region of the light chain may be referred to as “light chain variable region”, “heavy chain variable domain”, “VL” or “V_{L}” in the instant disclosure. Typically, the variable regions of both the heavy and light chains comprise three hypervariable regions, also called complementarity determining regions (CDRs), which are located within relatively conserved framework regions (FR). The CDRs are usually aligned by the framework regions, enabling binding to a specific epitope. In general, from N-terminal to C-terminal, both light and heavy chains variable domains comprise FR1, CDR1, FR2, CDR2, FR3, CDR3, and FR4. The assignment of amino acids to each domain is, generally, in accordance with the definitions of Sequences of Proteins of Immunological Interest, Kabat, et al.; National Institutes of Health, Bethesda, Md.; 5th ed.; NIH Publ. No. 91-3242 (1991); Kabat (1978) Adv. Prot. Chem. 32:1-75; Kabat, et al., (1977) J. Biol. Chem. 252:6609-6616; Chothia, et al., (1987) J Mol. Biol. 196:901-917 or Chothia, et al., (1989) Nature 342:878-883.

[0466] A “CDR” refers to one of three hypervariable regions (H1, H2, or H3) within the non-framework region of the antibody VH β-sheet framework, or one of three hypervariable regions (L1, L2, or L3) within the non-framework region of the antibody VL β-sheet framework. Accordingly, CDRs are variable region sequences interspersed within the framework region sequences. CDR regions are well known to those skilled in the art and have been defined by, for example, Kabat as the regions of most hypervariability within the antibody variable domains. CDR region sequences also have been defined structurally by Chothia as those residues that are not part of the conserved b-sheet framework, and thus are able to adapt to different conformation. Both terminologies are well recognized in the art. CDR region sequences have also been defined by AbM, Contact, and IMGT. The positions of CDRs within a canonical antibody variable region have been determined by comparison of numerous structures (A1-Lazikani et al., 1997, J. Mol. Biol. 273:927-48; Morea et al., 2000, Methods 20:267-79). Because the number of residues within a hypervariable region varies in different antibodies, additional residues relative to the canonical positions are conventionally numbered with a, b, c and so forth next to the residue number in the canonical variable region numbering scheme (A1-Lazikani et al., supra). Such nomenclature is similarly well known to those skilled in the art. Correspondence between the numbering system, including, for example, the Kabat numbering and the IMGT unique numbering system, is well known to one skilled in the art and shown below in Table 1. In some embodiments, the CDRs are as defined by the Kabat numbering system. In other embodiments, the CDRs are as defined by the IMGT numbering system. In yet other embodiments, the CDRs are as defined by the AbM numbering system. In still other embodiments, the CDRs are as defined by the Chothia numbering system. In yet other embodiments, the CDRs are as defined by the Contact numbering system. See Kabat et al., (1991) Sequences of Proteins of Immunological Interest, 5th Ed. Public Health Service, National Institutes of Health, Bethesda, Md.) and/or those residues from a “hypervariable loop” (i.e., residues 26-32 (L1), 50-52 (L2) and 91-96 (L3) in the light chain variable domain and 26-32 (H1), 53-55 (H2) and 96-101 (H3) in the heavy chain variable domain; Chothia and Lesk, (1987) J. Mol. Biol. 196: 901-917).

[0467] The constant regions of the antibodies may mediate the binding of the immunoglobulin to host tissues or factors, including various cells of the immune system (e.g., effector cells) and the first component (C1q) of the classical complement system. Typically, the numbering of the amino acids in the heavy chain constant domain begins with number 118, which is in accordance with the Eu numbering scheme. The Eu numbering scheme is based upon the amino acid sequence of human IgG₁ (Eu), which has a constant domain that begins at amino acid position 118 of the amino acid sequence of the IgG₁ described in Edelman et al., Proc. Natl. Acad. Sci. USA. 63: 78-85 (1969), and is shown for the IgG₁, IgG₂, IgG₃, and IgG₄ constant domains in Béranger, et al., Ibid.

[0468] The variable regions of the heavy and light chains contain a binding domain comprising the CDRs that interacts with an antigen. A number of methods are available in the art for defining CDR sequences of antibody variable domains (see Dondelinger et al., Frontiers in Immunol. 9: Article 2278 (2018)). The common numbering schemes include the following.
[0469] Kabat numbering scheme is based on sequence variability and is the most commonly used (See Kabat et al. Sequences of Proteins of Immunological Interest, 5th Ed. Public Health Service, National Institutes of Health, Bethesda, Md. (1991) (defining the CDR regions of an antibody by sequence);
[0470] Chothia numbering scheme is based on the location of the structural loop region (See Chothia & Lesk J. Mol. Biol. 196: 901-917 (1987); Al-Lazikani et al., J. Mol. Biol. 273: 927-948 (1997));
[0471] AbM numbering scheme is a compromise between the two used by Oxford Molecular's AbM antibody modelling software (see Karu et al., ILAR Journal 37: 132-141 (1995);
[0472] Contact numbering scheme is based on an analysis of the available complex crystal structures (See www.bioinf.org.uk: Prof. Andrew C. R. Martin's Group; Abhinandan & Martin, Mol. Immunol. 45:3832-3839 (2008).
[0473] IMGT (ImMunoGeneTics) numbering scheme is a standardized numbering system for all the protein sequences of the immunoglobulin superfamily, including variable domains from antibody light and heavy chains as well as T cell receptor chains from different species and counts residues continuously from 1 to 128 based on the germ-line V sequence alignment (see Giudicelli et al., Nucleic Acids Res. 25:206-11 (1997); Lefranc, Immunol Today 18:509(1997); Lefranc et al., Dev Comp Immunol. 27:55-77 (2003)).

[0474] The following general rules disclosed in www.bioinf.org.uk: Prof Andrew C. R. Martin's Group and reproduced in Table 1 below may be used to define the CDRs in an antibody sequence that includes those amino acids that specifically interact with the amino acids comprising the epitope in the antigen to which the antibody binds. There are rare examples where these generally constant features do not occur; however, the Cys residues are the most conserved feature.

TABLE 1
CDRs in antibody and antigen binding fragments thereof

| Loop | Kabat | AbM | Chothia¹ | Contact² | IMGT |
|---|---|---|---|---|---|
| L1 | L24-L34 | L24-L34 | L24-L34 | L30-L36 | L27-L32 |
| L2 | L50-L56 | L50-L56 | L50-L56 | L46-L55 | L50-L52 |
| L3 | L89-L97 | L89-L97 | L89-L97 | L89-L96 | L89-L97 |
| H1 | H31-H35B | H26-H35B | H26-H32..34 | H30-H35B | H26-H35B |
| | (Kabat | | | | |
| | Numbering)³ | | | | |
| H1 | H31-H35 | H26-H35 | H26-H32 | H30-H35 | H26-H33 |
| | (Chothia | | | | |
| | Numbering) | | | | |
| H2 | H50-H65 | H50-H58 | H52-H56 | H47-H58 | H51-H56 |
| H3 | H95-H102 | H95-H102 | H95-H102 | H93-H101 | H93-H102 |

¹Some of these numbering schemes (particularly for Chothia loops) vary depending on the individual publication examined.
²Any of the numbering schemes can be used for these CDR definitions, except the Contact numbering scheme uses the Chothia or Martin (Enhanced Chothia) definition.
³The end of the Chothia CDR-H1 loop when numbered using the Kabat numbering convention varies between H32 and H34 depending on the length of the loop. (This is because the Kabat numbering scheme places the insertions at H35A and H35B.)
If neither H35A nor H35B is present, the loop ends at H32
If only H35A is present, the loop ends at H33
If both H35A and H35B are present, the loop ends at H34

[0475] As used herein, the term “framework” or “FR” residues refers to those variable domain residues other than the hypervariable region residues defined herein as CDR residues. The residue numbering above relates to the Kabat numbering system and does not necessarily correspond in detail to the sequence numbering in the accompanying Sequence Listing. Amino acid residues in antibodies can also be defined using other numbering systems, such as Chothia, enhanced Chothia, IMGT, Kabat/Chothia composite, Honegger (AHo), Contact, or any other conventional antibody numbering scheme.

[0476] An “isolated antibody,” as used herein, is intended to refer to an antibody which is substantially free of other antibodies having different antigenic specificities.

[0477] As used herein, “isotype” refers to the antibody class (e.g., IgG (including IgG1, IgG2, IgG3, and IgG4), IgM, IgA (including IgA1 and IgA2), IgD, and IgE antibody) that is encoded by the heavy chain constant region genes of the antibody.

[0478] An “effector function” refers to the interaction of an antibody Fc region with an Fc receptor or ligand, or a biochemical event that results therefrom. Exemplary “effector functions” include Clq binding, complement dependent cytotoxicity (CDC), Fc receptor binding, FcγR-mediated effector functions such as ADCC and antibody dependent cell-mediated phagocytosis (ADCP), and downregulation of a cell surface receptor (e.g., the B cell receptor; BCR). Such effector functions generally require the Fc region to be combined with a binding domain (e.g., an antibody variable domain).

[0479] An “Fc region,” “Fc domain,” or “Fc” refers to the C-terminal region of the heavy chain of an antibody. Thus, an Fc region comprises the constant region of an antibody excluding the first constant region immunoglobulin domain (e.g., CH1 or CL).

[0480] The term “epitope” or “antigenic determinant” refers to a site on an antigen (e.g., human LAP-TGFβ1) to which an immunoglobulin or antibody specifically binds. Epitopes can be formed both from contiguous amino acids (usually a linear epitope) or noncontiguous amino acids juxtaposed by tertiary folding of the protein (usually a conformational epitope). Epitopes formed from contiguous amino acids are typically, but not always, retained on exposure to denaturing solvents, whereas epitopes formed by tertiary folding are typically lost on treatment with denaturing solvents. An epitope typically includes at least 3, 4, 5, 6, 7, 8, 9, 10, 11, 12, 13, 14, 15, 16, 17, 18, 19, 20, 21, or 22 amino acids in a unique spatial conformation.

[0481] The term “epitope mapping” refers to the process of identifying the molecular determinants on the antigen involved in antibody-antigen recognition. Methods for determining what epitopes are bound by a given antibody are well known in the art and include, for example, immunoblotting and immunoprecipitation assays, wherein overlapping or contiguous peptides from, e.g., LAP-TGFβ1 are tested for reactivity with a given antibody (e.g., anti-LAP antibody); x-ray crystallography; antigen mutational analysis, two-dimensional nuclear magnetic resonance; yeast display; and hydrogen/deuterium exchange-mass spectrometry (HDX-MS) (see, e.g., Epitope Mapping Protocols in Methods in Molecular Biology, Vol. 66, G. E. Morris, Ed. (1996)). See also Champe et al. (1995) J. Biol. Chem. 270:1388-1394.

[0482] The term “binds to the same epitope” with reference to two or more antibodies means that the antibodies bind to the same segment or same segments of amino acid residues, as determined by a given method. Techniques for determining whether antibodies bind to the “same epitope on LAP-TGFβ1” with the antibodies described herein include, for example, epitope mapping methods, such as x-ray analyses of crystals of antigen:antibody complexes, which provides atomic resolution of the epitope, and HDX-MS. Other methods monitor the binding of the antibody to antigen fragments thereof (e.g. proteolytic fragments) or to mutated variations of the antigen where loss of binding due to a modification of an amino acid residue within the antigen sequence is often considered an indication of an epitope component, such as alanine scanning mutagenesis (Cunningham & Wells (1985) Science 244:1081), yeast display of mutant target sequence variants, or analysis of chimeras. In addition, computational combinatorial methods for epitope mapping can also be used. These methods rely on the ability of the antibody of interest to affinity isolate specific short peptides from combinatorial phage display peptide libraries. Antibodies having the same VH and VL or the same CDR1, 2 and 3 sequences are expected to bind to the same epitope.

[0483] Antibodies that “compete with another antibody for binding to a target” refer to antibodies that inhibit (partially or completely) the binding of the other antibody to the target. Whether two antibodies compete with each other for binding to a target, i.e., whether and to what extent one antibody inhibits the binding of the other antibody to a target, may be determined using known binding competition experiments, e.g., BIACORE® surface plasmon resonance (SPR) analysis. In certain embodiments, an antibody competes with, and inhibits binding of another antibody to a target by at least 50%, 60%, 70%, 80%, 90% or 100%. The level of inhibition or competition may be different depending on which antibody is the “blocking antibody” (i.e., the antibody that when combined with an antigen blocks another immunologic reaction with the antigen). Competition assays can be conducted as described, for example, in Ed Harlow and David Lane, Cold Spring Harb. Protoc. 2006; doi:10.1101/pdb.prot4277 or in Chapter 11 of “Using Antibodies” by Ed Harlow and David Lane, Cold Spring Harbor Laboratory Press, Cold Spring Harbor, N.Y., USA 1999. Competing antibodies bind to the same epitope, an overlapping epitope, or to adjacent epitopes (e.g., as evidenced by steric hindrance). Two antibodies “cross-compete” if antibodies block each other both ways by at least 50%, i.e., regardless of whether one or the other antibody is contacted first with the antigen in the competition experiment.

[0484] Competitive binding assays for determining whether two antibodies compete or cross-compete for binding include competition for binding to cells expressing LAP-TGFβ1, e.g., by flow cytometry. Other methods include: SPR (e.g., BIACORE®), solid phase direct or indirect radioimmunoassay (RIA), solid phase direct or indirect enzyme immunoassay (EIA), sandwich competition assay (see Stahli et al., Methods in Enzymology 9:242 (1983)); solid phase direct biotin-avidin EIA (see Kirkland et al., J. Immunol. 137:3614 (1986)); solid phase direct labeled assay, solid phase direct labeled sandwich assay (see Harlow and Lane, Antibodies: A Laboratory Manual, Cold Spring Harbor Press (1988)); solid phase direct label RIA using 1-125 label (see Morel et al., Mol. Immunol. 25(1):7 (1988)); solid phase direct biotin-avidin EIA (Cheung et al., Virology 176:546 (1990)); and direct labeled RIA. (Moldenhauer et al., Scand. J. Immunol. 32:77 (1990)).

[0485] As used herein, the terms “specific binding,” “selective binding,” “selectively binds,” and “specifically binds,” refer to antibody binding to an epitope on a predetermined antigen. Typically, the antibody (i) binds with an equilibrium dissociation constant (K_{D}) of approximately less than 10⁻⁷ M, such as approximately less than 10⁻⁸ M, 10⁻⁹ M or 10⁻¹⁰ M or even lower when determined by, e.g., SPR using a predetermined antigen as the analyte and the antibody as the ligand, or Scatchard analysis of binding of the antibody to antigen positive cells, and (ii) binds to the predetermined antigen with an affinity that is at least two-fold greater than its affinity for binding to a non-specific antigen (e.g., BSA, casein) other than the predetermined antigen or a closely-related antigen. Any K_{D} greater than about 10⁻⁴ M is generally considered to indicate nonspecific binding.

[0486] The term “k_{assoc}” or “kₐ”, as used herein, refers to the association rate of a particular antibody-antigen interaction, whereas the term “k_{dis}” or “k_{d},” as used herein, is intended to refer to the dissociation rate of a particular antibody-antigen interaction. The term “K_{D}”, as used herein, is intended to refer to the dissociation constant, which is obtained from the ratio of k_{d} to kₐ (i.e., k_{d}/kₐ) and is expressed as a molar concentration (M). K_{D} values for antibodies or antigen binding fragments thereof can be determined using methods well established in the art. A preferred method for determining the K_{D} of an antibody or antigen binding fragment thereof is by using SPR, preferably using a biosensor system such as a Biacore® system or flow cytometry and Scatchard analysis, or bio-layer interferometry.

[0487] The term “EC50” in the context of an in vitro or in vivo assay using an antibody or antigen binding fragment thereof refers to the concentration of an antibody or antigen binding fragment thereof that induces a response that is 50% of the maximal response, i.e., halfway between the maximal response and the baseline.

[0488] The term “cross-reacts,” as used herein, refers to the ability of an antibody or antigen binding fragment thereof described herein to bind to LAP-TGFβ1 from a different species. For example, an antibody or antigen binding fragment thereof described herein that binds human LAP-TGFβ1 may also bind another species of LAP-TGFβ1 (e.g., murine LAP-TGFβ1, rat LAP-TGFβ1, or cynomolgus monkey LAP-TGFβ1). Cross-reactivity may be measured by detecting a specific reactivity with purified antigen in binding assays (e.g., SPR, ELISA, bio-layer interferometry) or binding to, or otherwise functionally interacting with, cells physiologically expressing LAP-TGFβ1 (e.g., HT1080 cells overexpressing LAP-TGFβ1). Methods for determining cross-reactivity include standard binding assays as described herein, for example, by bio-layer interferometry or flow cytometric techniques.

[0489] As used herein, the term “linked” refers to the association of two or more molecules. The linkage can be covalent or non-covalent. The linkage also can be genetic (i.e., recombinantly fused). Such linkages can be achieved using a wide variety of art recognized techniques, such as chemical conjugation and recombinant protein production.

[0490] The term “nucleic acid molecule,” as used herein, is intended to include DNA molecules and RNA molecules. A nucleic acid molecule may be single-stranded or double-stranded, but preferably is double-stranded DNA.

[0491] The term “isolated nucleic acid molecule,” as used herein in reference to nucleic acids encoding antibodies or antibody binding fragments thereof (e.g., VH, VL, CDR3), is intended to refer to a nucleic acid molecule in which the nucleotide sequences are essentially free of other genomic nucleotide sequences, e.g., those encoding antibodies or antibody binding fragments thereof that bind antigens other than LAP, which other sequences may naturally flank the nucleic acid in human genomic DNA.

[0492] The term “vector,” as used herein, is intended to refer to a nucleic acid molecule capable of transporting another nucleic acid to which it has been linked. One type of vector is a “plasmid,” which refers to a circular double stranded DNA loop into which additional DNA segments may be ligated. Another type of vector is a viral vector, wherein additional DNA segments may be ligated into the viral genome. Certain vectors are capable of autonomous replication in a host cell into which they are introduced (e.g., bacterial vectors having a bacterial origin of replication and episomal mammalian vectors). Other vectors (e.g., non-episomal mammalian vectors) can be integrated into the genome of a host cell upon introduction into the host cell, and thereby are replicated along with the host genome. Moreover, certain vectors are capable of directing the expression of genes to which they are operatively linked. Such vectors are referred to herein as “recombinant expression vectors” (or simply, “expression vectors”). In general, expression vectors of utility in recombinant DNA techniques are often in the form of plasmids. In the present specification, “plasmid” and “vector” may be used interchangeably as the plasmid is the most commonly used form of vector. However, also included are other forms of expression vectors, such as viral vectors (e.g., replication defective retroviruses, adenoviruses and adeno-associated viruses), which serve equivalent functions.

[0493] Also provided are “conservative sequence modifications” of the sequences set forth herein, i.e., amino acid sequence modifications which do not abrogate the binding of the antibody or antigen binding fragment thereof encoded by the nucleotide sequence or containing the amino acid sequence, to the antigen. Such conservative sequence modifications include conservative nucleotide and amino acid substitutions, as well as, nucleotide and amino acid additions and deletions. For example, modifications can be introduced into a sequence in a table herein (e.g., Tables 4, 6, 8, 11-43, and 45) by standard techniques known in the art, such as site-directed mutagenesis and PCR-mediated mutagenesis. Conservative amino acid substitutions include ones in which the amino acid residue is replaced with an amino acid residue having a similar side chain. Families of amino acid residues having similar side chains have been defined in the art. These families include amino acids with basic side chains (e.g., lysine, arginine, histidine), acidic side chains (e.g., aspartic acid, glutamic acid), uncharged polar side chains (e.g., glycine, asparagine, glutamine, serine, threonine, tyrosine, cysteine, tryptophan), nonpolar side chains (e.g., alanine, valine, leucine, isoleucine, proline, phenylalanine, methionine), beta-branched side chains (e.g., threonine, valine, isoleucine) and aromatic side chains (e.g., tyrosine, phenylalanine, tryptophan, histidine). Thus, a predicted nonessential amino acid residue in an anti-LAP antibody is preferably replaced with another amino acid residue from the same side chain family. Methods of identifying nucleotide and amino acid conservative substitutions which do not eliminate antigen binding are well-known in the art (see, e.g., Brummell et al., Biochem. 32:1180-1187 (1993); Kobayashi et al. Protein Eng. 12(10):879-884 (1999); and Burks et al. Proc. Natl. Acad. Sci. USA 94:412-417 (1997)). Alternatively, in another embodiment, mutations can be introduced randomly along all or part of an anti-LAP antibody coding sequence or anti-LAP antigen binding fragment thereof coding sequence, such as by saturation mutagenesis, and the resulting modified anti-LAP antibodies can be screened for binding activity.

[0494] For nucleic acids, the term “substantial homology” indicates that two nucleic acids, or designated sequences thereof, when optimally aligned and compared, are identical, with appropriate nucleotide insertions or deletions, in at least about 80% of the nucleotides, usually at least about 80% to 85%, 85% to 90% or 90% to 95%, and more preferably at least about 98% to 99.5% of the nucleotides. Alternatively, substantial homology exists when the segments will hybridize under selective hybridization conditions, to the complement of the strand. For polypeptides, the term “substantial homology” indicates that two polypeptides, or designated sequences thereof, when optimally aligned and compared, are identical, with appropriate amino acid insertions or deletions, in at least about 80% of the amino acids, usually at least about 80% to 85%, 85% to 90%, 90% to 95%, and more preferably at least about 98% to 99.5% of the amino acids.

[0495] The percent identity between two sequences is a function of the number of identical positions shared by the sequences (i.e., % homology=#of identical positions/total #of positions ×100), taking into account the number of gaps, and the length of each gap, which need to be introduced for optimal alignment of the two sequences. The comparison of sequences and determination of percent identity between two sequences can be accomplished using a mathematical algorithm, as described in the non-limiting examples below.

[0496] The percent identity between two nucleotide sequences can be determined using the GAP program in the GCG software package (available at http://www.gcg.com), using a NWSgapdna.CMP matrix and a gap weight of 40, 50, 60, 70, or 80 and a length weight of 1, 2, 3, 4, 5, or 6. The percent identity between two nucleotide or two amino acid sequences can also be determined using the algorithm of E. Meyers and W. Miller (CABIOS, 4:11-17 (1989)) which has been incorporated into the ALIGN program (version 2.0), using a PAM120 weight residue table, a gap length penalty of 12 and a gap penalty of 4. In addition, the percent identity between two amino acid sequences can be determined using the Needleman and Wunsch (J. Mol. Biol. (48):444-453 (1970)) algorithm which has been incorporated into the GAP program in the GCG software package (available at http://www.gcg.com), using either a Blossum 62 matrix or a PAM250 matrix, and a gap weight of 16, 14, 12, 10, 8, 6, or 4 and a length weight of 1, 2, 3, 4, 5, or 6.

[0497] The nucleic acid and protein sequences described herein can further be used as a “query sequence” to perform a search against public databases to, for example, identify related sequences. Such searches can be performed using the NBLAST and XBLAST programs (version 2.0) of Altschul, et al. (1990) J. Mol. Biol. 215:403-10. BLAST nucleotide searches can be performed with the NBLAST program, score=100, wordlength=12 to obtain nucleotide sequences homologous to the nucleic acid molecules described herein. BLAST protein searches can be performed with the XBLAST program, score=50, wordlength=3 to obtain amino acid sequences homologous to the protein molecules described herein. To obtain gapped alignments for comparison purposes, Gapped BLAST can be utilized as described in Altschul et al., (1997) Nucleic Acids Res. 25(17):3389-3402. When utilizing BLAST and Gapped BLAST programs, the default parameters of the respective programs (e.g., XBLAST and NBLAST) can be used. See www.ncbi.nlm.nih.gov.

[0498] The term “recombinant host cell” (or simply “host cell”), as used herein, is intended to refer to a cell that comprises a nucleic acid that is not naturally present in the cell, and may be a cell into which a recombinant expression vector has been introduced. It should be understood that such terms are intended to refer not only to the particular subject cell but to the progeny of such a cell. Because certain modifications may occur in succeeding generations due to either mutation or environmental influences, such progeny may not, in fact, be identical to the parent cell, but are still included within the scope of the term “host cell” as used herein.

[0499] The term “inhibition” as used herein, refers to any statistically significant decrease in biological activity, including partial and full blocking of the activity. For example, “inhibition” can refer to a statistically significant decrease of about 10%, 20%, 30%, 40%, 50%, 60%, 70%, 80%, 90%, 95%, 96%, 97%, 98%, 99%, or 100% in biological activity (e.g., TGFβ1).

[0500] As used herein, “TGFβ1 activation” refers to the release of the mature cytokine TGFβ1 from the latent complex made up of LAP and TGFβ1. There are many mechanisms known to induce TGFβ1 activation (see Robertson I B, Rifkin D B. Unchaining the beast; insights from structural and evolutionary studies on TGFβ1 secretion, sequestration, and activation. Cytokine Growth Factor Rev. 2013 August; 24(4):355-72). The mature cytokine can be detected using a specific ELISA or similar detection methodology or through the use of a reporter cell line that expresses a TGFβ receptor.

[0501] For example, as used herein, the term “inhibits TGFβ1 activation” includes any measurable decrease in TGFβ1 activation, e.g., an inhibition of TGFβ1 activation by at least about 10%, for example, at least about 20%, at least about 30%, at least about 40%, at least about 50%, at least about 60%, at least about 70%, at least about 80%, at least about 90%, at least about 99%, or about 100%, relative to a control (e.g., a control antibody). The inhibition may be specific to a single mechanism of TGFβ1 activation or may be generalizable to all mechanisms of TGFβ1 activation. As used herein, the term “inhibits TGFβ1 activation” includes inhibition of at least one activation mechanism.

[0502] The terms “treat,” “treating,” and “treatment,” as used herein, refer to therapeutic or preventative measures described herein. The methods of “treatment” employ administration to a subject with a tumor or cancer or a subject who is predisposed to having such a disease or disorder, an anti-LAP antibody (e.g., anti-human LAP antibody) or antigen binding fragment thereof described herein, in order to prevent, cure, delay, reduce the severity of, or ameliorate one or more symptoms of the disease or disorder or recurring disease or disorder, or in order to prolong the survival of a subject beyond that expected in the absence of such treatment.

[0503] “Immunotherapy” refers to the treatment of a subject afflicted with, or at risk of contracting or suffering a recurrence of, a disease by a method comprising inducing, enhancing, suppressing or otherwise modifying an immune response.

[0504] “Immunostimulating therapy” or “immunostimulatory therapy” refers to a therapy that results in increasing (inducing or enhancing) an immune response in a subject for, e.g., treating cancer.

[0505] As used herein, “immune cell” refers to the subset of blood cells known as white blood cells, which include mononuclear cells such as lymphocytes, monocytes, macrophages, and granulocytes.

[0506] As used herein, “immunosuppressive cell” refers to a cell that contributes to or promotes an immunosuppressive tumor microenvironment. The presence of a population of immunosuppressive cells in a tumor microenvironment increases the tumor's resistance to an immune response, resulting in tumor protection, tumor escape, and/or tumor metastasis. Unless countered in some manner, these immunosuppressive cells can decrease the efficacy of immune-mediated anti-cancer treatments. Exemplary immunosuppressive cells include cancer-associated fibroblasts, myeloid-derived suppressor cells, regulatory T cells (Tregs), tumor cells expressing LAP, and immunosuppressive macrophages. These cell types can be identified by one skilled in the art using, e.g., flow cytometry to identify markers of Tregs (e.g., CD4, FoxP3, CD127, and CD25), macrophages (e.g., CSF-IR, CD203, CD206, CD163, IL-10, and TGFβ), cancer associated fibroblasts (e.g., alpha smooth muscle actin, fibroblast activation protein, tenascin-C, periostin, NG2, vimentin, desmin, PDGFR alpha and beta, FSP-1, ASPN, and STC1), and myeloid-derived suppressor cells (e.g., CD11b, CD33, CD14, or CD15, and low levels of HLA DR). It is understood that immunosuppressive cells may also be important in suppressing the immune system in other disease states.

[0507] As used herein, “suppressive T cells” refer to T cells that contribute to or promote an immunosuppressive microenvironment. Exemplary suppressive T cells include CD4+ regulatory T cells and CD8+ regulatory T cells. Such cells can be identified by one skilled in the art using, e.g., flow cytometry to identify markers such as FoxP3, LAP or Helios.

[0508] As used herein, “regulatory T cells” or “Tregs” refer to immunosuppressive cells that generally suppress or downregulate induction and proliferation of effector T cells. Tregs may express the biomarkers CD4, FOXP3, and CD25 and are thought to be derived from the same lineage as naïve CD4 cells.

[0509] “T effector” (“Teff”) cells refers to T cells (e.g., CD4+ and CD8+T cells) with cytolytic activities as well as T helper (Th) cells, which secrete inflammatory cytokines and activate and direct other immune cells, but does not include regulatory T cells (Treg cells).

[0510] As used herein, “administering” refers to the physical introduction of a molecule (e.g., an antibody or antigen binding fragment thereof that binds LAP as described herein) or of a composition comprising a therapeutic agent (e.g., an anti-LAP antibody or antigen binding fragment thereof as described herein) to a subject, using any of the various methods and delivery systems known to those skilled in the art. Preferred routes of administration for antibodies described herein include intravenous, intraperitoneal, intramuscular, subcutaneous, spinal or other parenteral routes of administration, for example by injection or infusion. The phrase “parenteral administration” as used herein means modes of administration other than enteral and topical administration, usually by injection, and includes, without limitation, intravenous, intraperitoneal, intramuscular, intraarterial, intrathecal, intralymphatic, intralesional, intracapsular, intraorbital, intracardiac, intradermal, transtracheal, subcutaneous, subcuticular, intraarticular, subcapsular, subarachnoid, intraspinal, epidural and intrasternal injection and infusion, as well as in vivo electroporation. Alternatively, an antibody or antigen binding fragment thereof as described herein can be administered via a non-parenteral route, such as a topical, epidermal or mucosal route of administration, for example, intranasally, orally, vaginally, rectally, sublingually or topically. Administering can also be performed, for example, once, a plurality of times, and/or over one or more extended periods.

[0511] As used herein, “cancer” refers to a broad group of diseases characterized by the uncontrolled growth of abnormal cells in the body. Unregulated cell division may result in the formation of malignant tumors or cells that invade neighboring tissues and may metastasize to distant parts of the body through the lymphatic system or bloodstream.

[0512] As used herein, “autoimmune disease” describes a disease state or syndrome whereby a subject's body produces a dysfunctional immune response against the subject's own body components, with adverse effects.

[0513] As used herein, “fibrosis” refers to disorders or disease states that are caused by or accompanied by the abnormal deposition of extracellular matrix (i.e., not formation of fibrous tissue in normal organ and tissue). Fibrosis is characterized by excessive accumulation of extracellular matrix in the affected tissue that often results in destruction of its normal architecture and causes significant organ dysfunction. Although fibrotic conditions in various organs have diverse etiologies, fibrosis typically results from chronic persistent inflammation induced by a variety of stimuli, such as chronic infections, ischemia, allergic and autoimmune reactions, chemical insults or radiation injury (from Biernacka, 2011 Growth Factors. 2011 Oct.; 29(5):196-202. doi: 10.3109/08977194.2011.595714. Epub 2011 Jul. 11). Fibrosis may affect the heart, liver, kidney, lung and skin and is also a central feature in many cancers. As used herein, “cell therapy” refers to a method of treatment involving the administration of live cells (e.g., CAR T cells, and NK cells).

[0514] The terms “treat,” “treating,” and “treatment,” as used herein, refer to any type of intervention or process performed on, or administering an active agent (e.g., an anti-LAP antibody or antigen binding fragment thereof) to, the subject with the objective of reversing, alleviating, ameliorating, inhibiting, or slowing down or preventing the progression, development, severity or recurrence of a symptom, complication, condition or biochemical indicia associated with a disease. Treatment can be of a subject having a disease or a subject who does not have a disease (e.g., for prophylaxis).

[0515] As used herein, “adjunctive” or “combined” administration (co-administration) includes simultaneous administration of the agents and/or compounds in the same or different dosage form, or separate administration of the compounds (e.g., sequential administration). For example, at least one agent comprises an anti-LAP antibody or antigen binding fragment thereof. Thus, a first antibody or antigen binding fragment thereof, e.g., an anti-LAP antibody or antigen binding fragment thereof, and a second, third, or more antibodies or antigen binding fragments thereof can be simultaneously administered in a single formulation. Alternatively, the first and second (or more) antibodies or antigen binding fragments thereof can be formulated for separate administration and are administered concurrently or sequentially.

[0516] “Combination” therapy, as used herein, means administration of two or more therapeutic agents in a coordinated fashion, and includes, but is not limited to, concurrent dosing. Specifically, combination therapy encompasses both co-administration (e.g. administration of a co-formulation or simultaneous administration of separate therapeutic compositions) and serial or sequential administration, provided that administration of one therapeutic agent is conditioned in some way on administration of another therapeutic agent. For example, one therapeutic agent may be administered only after a different therapeutic agent has been administered and allowed to act for a prescribed period of time. (See, e.g., Kohrt et al. (2011) Blood 117:2423). For example, the anti-LAP antibody can be administered first followed by (e.g., immediately followed by) the administration of a second antibody (e.g., an anti-PD-1 antibody) or antigen binding fragment thereof, or vice versa. In one embodiment, the anti-LAP antibody or antigen binding fragment thereof is administered prior to administration of the second antibody or antigen binding fragment thereof. In another embodiment, the anti-LAP antibody or antigen binding fragment thereof is administered, for example, a few minutes (e.g., within about 30 minutes) or at least one hour of the second antibody or antigen binding fragment thereof. Such concurrent or sequential administration preferably results in both antibodies or antigen binding fragments thereof being simultaneously present in treated patients.

[0517] The term “effective dose” or “effective dosage” is defined as an amount sufficient to achieve or at least partially achieve a desired effect. A “therapeutically effective amount” or “therapeutically effective dosage” of a drug (e.g., anti-LAP antibody or antigen binding fragment thereof) is any amount of the drug or therapeutic agent that, when used alone or in combination with another therapeutic agent, promotes disease regression evidenced by a decrease in severity of disease symptoms, an increase or cessation in frequency and duration of disease symptom-free periods, or a prevention of impairment or disability due to the disease affliction. A therapeutically effective amount or dosage of a drug or therapeutic agent includes a “prophylactically effective amount” or a “prophylactically effective dosage”, which is any amount of the drug or therapeutic agent that, when administered alone or in combination with another therapeutic agent to a subject at risk of developing a disease or of suffering a recurrence of disease, inhibits the development or recurrence of the disease. The ability of a therapeutic agent to promote disease regression or inhibit the development or recurrence of the disease can be evaluated using a variety of methods known to the skilled practitioner, such as in human subjects during clinical trials, in animal model systems predictive of efficacy in humans, or by assaying the activity of the agent in in vitro assays.

[0518] The administration of effective amounts of the anti-LAP antibody or antigen binding fragment thereof alone, or anti-LAP antibody or antigen binding fragment thereof combined with another compound or agent (e.g., an immune checkpoint blocker such as an anti-PD-1 antibody), according to any of the methods provided herein, can result in at least one therapeutic effect, including, for example, reduced tumor growth or size, reduced number of indicia of cancer (e.g., metastatic lesions) appearing over time, complete remission, partial remission, or stable disease. For example, the methods of treatment produce a comparable clinical benefit rate (CBR=complete remission (CR)+ partial remission (PR)+stable disease (SD) lasting≥6 months) better than that achieved without administration of the anti-LAP antibody or antigen binding fragment thereof, or than that achieved with administration of any one of the combined antibodies, e.g., the improvement of clinical benefit rate is about 20%, 30%, 40%, 50%, 60%, 70%, 80% or more.

[0519] By way of example, for the treatment of tumors, a therapeutically effective amount or dosage of the drug or therapeutic agent (e.g., anti-LAP antibody or antigen binding fragment thereof) inhibits tumor cell growth by at least about 20%, by at least about 30% by at least about 40%, by at least about 50%, by at least about 60%, by at least above 70%, by at least about 80%, or by at least about 90% relative to untreated subjects. In some embodiments, a therapeutically effective amount or dosage of the drug or therapeutic agent completely inhibits cell growth or tumor growth, i.e., inhibits cell growth or tumor growth by 100%. The ability of a compound or therapeutic agent, including an antibody, to inhibit tumor growth can be evaluated using the assays described herein. Alternatively, this property of a composition comprising the compound or therapeutic agent can be evaluated by examining the ability of the composition to inhibit cell growth; such inhibition can be measured in vitro by assays known to the skilled practitioner.

[0520] The term “patient” includes human and other mammalian subjects that receive either prophylactic or therapeutic treatment.

[0521] As used herein, the term “subject” includes any human or non-human animal. For example, the methods and compositions described herein can be used to treat a subject having cancer. The term “non-human animal” includes all vertebrates, e.g., mammals and non-mammals, such as non-human primates, sheep, cats, dogs, cows, chickens, amphibians, reptiles, etc.

[0522] The term “sample” refers to tissue, bodily fluid, or a cell (or a fraction of any of the foregoing) taken from a patient or a subject. Normally, the tissue or cell will be removed from the patient, but in vivo diagnosis is also contemplated. In the case of a solid tumor, a tissue sample can be taken from a surgically removed tumor and prepared for testing by conventional techniques. In the case of lymphomas and leukemias, lymphocytes, leukemic cells, or lymph tissues can be obtained (e.g., leukemic cells from blood) and appropriately prepared. Other samples, including urine, tears, serum, plasma, cerebrospinal fluid, feces, sputum, cell extracts etc. can also be useful for particular cancers.

[0523] As used herein, “comprising” is synonymous with “including,” “containing,” or “characterized by,” and is inclusive or open-ended and does not exclude additional, unrecited elements or method steps. As used herein, “consisting of” excludes any element, step, or ingredient not specified in the claim element. As used herein, “consisting essentially of” does not exclude materials or steps that do not materially affect the basic and novel characteristics of the claim. In each instance herein any of the terms “comprising,” “consisting essentially of,” and “consisting of” may be optionally replaced with either of the other two terms, thus describing alternative aspects of the scope of the subject matter. The invention illustratively described herein suitably may be practiced in the absence of any element or elements, limitation or limitations which is not specifically disclosed herein.

[0524] As used herein, the singular forms “a,” “an,” and “the” include plural referents unless the context clearly dictates otherwise. The use of “or” or “and” means “and/or” unless stated otherwise. Furthermore, use of the term “including” as well as other forms, such as “include,” “includes,” and “included,” is not limiting.

[0525] The term “about” as used herein when referring to a measurable value such as an amount, a temporal duration and the like, encompasses variations of up to ±10% from the specified value. Unless otherwise indicated, all numbers expressing quantities of ingredients, properties such as molecular weight, reaction conditions, etc., used herein are to be understood as being modified by the term “about”.

[0526] As used herein, “and/or” is to be taken as specific disclosure of each of the two specified features or components with or without the other. Thus, the term “and/or” as used in a phrase such as “A and/or B” includes “A and B,” “A or B,” “A” alone, and “B” alone. Likewise, the term “and/or” as used in a phrase such as “A, B, and/or C” encompasses each of the following: A, B, and C; A, B, or C; A or C; A or B; B or C; A and C; A and B; B and C; A alone; B alone; and C alone.

[0527] As used herein, the terms “ug” and “uM” are used interchangeably with “μg” and “μM,” respectively.

[0528] Various aspects described herein are described in further detail in the following subsections.

[0529] The location of the LAP-TGFβ1 complex is of critical biological and clinical importance because, once the mature TGFβ1 cytokine, which has a short half-life in solution, is released, it acts locally, either in an autocrine or near paracrine fashion. Therefore, the anchor proteins are a principal mechanism whereby latent TGFβ1 is staged in a specific location, awaiting the release of the potent mature cytokine to act on the local tissue.

[0530] LAP-TGFβ1 has different functions when expressed in different locations. For example, LAP-TGFβ1 anchored by LTBPs in the extracellular matrix is of primary importance for tissue homeostasis. In this regard, Xu et al. (Bone Research 2018; 6:2) noted that “the TGF-β complex is more like a molecular sensor that responds instantly to ECM perturbations through the release of an active ligand that exerts physiological effects at a cellular level, thus ensuring normal tissue homeostasis.”

[0531] Alterations in LAP-TGFβ1 incorporation into the extracellular matrix are known to result in human disease. For example, deletion of LTBP-3 in both mice and humans results in similar defects in both bone and dental formation. LTBP-3 defects are also associated with the aortic dilation seen in Marfan syndrome (Rifkin et al., Matrix Biol 2018; 71-72:90-99). These effects are believed to be due to aberrant direct effects of TGFβ1 in the local extracellular matrix (Xu et al, Bone Research 2018; 6:2).

[0532] In contrast to anchor proteins that localize LAP-TGFβ1 to the extracellular matrix, LAP-TGFβ1 anchored by GARP is of primary importance for the immunosuppressive function of regulatory T cells (Edwards et al, Eur J Immunol 2016; 46:1480-9) and of suppressive B cell subpopulations (Wallace et al, JCI Insight 2018; 3:e99863). Some tumors have also been shown to express GARP, allowing them to locally express TGFβ and directly suppress the immune system in the tumor microenvironment and support their own growth (Metelli et al, Journal of Hematology & Oncology 2018; 11:24).

[0533] LAP-TGFβ1 anchored to myeloid cells is of primary importance for the immunosuppressive function of MDSCs (Zhang H et al., Frontiers in Immunology 2017; 8:1-15) and of M2 macrophages (Zhang et al., Oncotarget 2017; 8:99801-15). According to a recent study, myeloid cells have been shown to use the anchor protein LRRC33 to anchor latent TGFβ to the cell surface (Qin et al., Cell 2018; 174:1-16).

### I. Anti-LAP Antibodies

[0534] In one aspect, provided herein is an isolated anti-LAP antibody (i.e., an antibody that binds LAP) or antigen binding fragment thereof.

[0535] In one aspect, provided herein is an isolated anti-LAP antibody (e.g., recombinant humanized, chimeric, or human antibody) or antigen binding fragment thereof which comprises an amino acid sequence described herein:

[0536] Functional features of the anti-LAP antibodies or antigen binding fragment thereof provided herein are described below in more detail.

[0537] In some embodiments, the anti-LAP antibody or antigen binding fragment thereof described herein binds to LAP-TGFβ1 (e.g., human LAP-TGFβ1) in the absence of an anchor protein. For example, the anti-LAP antibody or antigen binding fragment thereof described herein binds to recombinant human LAP-TGFβ1 in an assay that does not include an anchor protein. [start here]

[0538] In some embodiments, the anti-LAP antibody or antigen binding fragment thereof described herein binds to LAP-TGFβ1 (e.g., soluble LAP-TGFβ1) with a K_{D} of 100 nM or less, such as 90 nM or less, 80 nM or less, 70 nM or less, 60 nM or less, 50 nM or less, such as 40 nM or less, 30 nM or less, 20 nM or less, 10 nM or less, 5 nM or less, 3 nM or less, 1 nM or less, 0.9 nM or less, 0.8 nM or less, 0.7 nM or less, 0.6 nM or less, 0.5 nM or less, 0.4 nM or less, 0.3 nM or less, 0.2 nM or less, 0.1 nM or less, 10 nM to 0.1 nM, 5 nM to 0.1 nM, 3 nM to 0.1 nM, 1 nM to 0.1 nM, 0.8 nM to 0.1 nM, 0.5 nM to 0.1 nM, 10 nM to 0.5 nM, 10 nM to 0.8 nM, 10 nM to 1 nM, 1 nM to 0.5 nM, or 1 nM to 0.8 nM, as assessed by, e.g., bio-layer interferometry, or as determined by Octet or BIACore. In some embodiments, the anti-LAP antibody or antigen binding fragment thereof described herein binds to LAP-TGFβ1 (e.g., human, cyno, and rat) with a K_{D} in an Example herein. In various embodiments, the anti-LAP antibody or antigen binding fragment thereof described herein binds to human LAP-TGFβ1, rat LAP-TGFβ1, cyno LAP-TGFβ1, and/or murine LAP-TGFβ1.

[0539] In some embodiments, the anti-LAP antibody or antigen binding fragment thereof described herein described herein binds to LAP-TGFβ1 complexed with an anchor protein on immunosuppressive cells, but does not bind to the anchor protein. In some embodiments, the anchor protein is GARP or LRRC33.

[0540] In some embodiments, the anti-LAP antibody or antigen binding fragment thereof described herein described herein selectively inhibits TGFβ1 activation on immunosuppressive cells without inhibiting TGFβ1 activation on extracellular matrix.

[0541] In some embodiments, the anti-LAP antibody or antigen binding fragment thereof described herein does not bind to LAP complexed with LTBP1, LTBP3, and/or LTBP4.

[0542] In some embodiments, the anti-LAP antibody or antigen binding fragment thereof described herein does not bind to LAP-TGFβ2 (e.g., human LAP-TGFβ2) and LAP-TGFβ3 (e.g., human LAP-TGFβ3), as assessed by, e.g., flow cytometry using cells that overexpress TGFβ2 or TGFβ3, or bio-layer interferometry with recombinant LAP-TGFβ2 or LAP-TGFβ3. For example, in some embodiments, the anti-LAP antibody or antigen binding fragment thereof described herein binds to LAP-TGFβ2 or LAP-TGFβ3 with a signal or affinity that is not significantly above the signal seen with a control antibody (e.g., isotype control) or the signal seen in the absence of anti-LAP antibody.

[0543] In some embodiments, the anti-LAP antibody or antigen binding fragment thereof described herein inhibits TGFβ1 activation, as assessed by, e.g., ELISA detection of free TGFβ1 in a culture of P3U1 cells overexpressing LAP-TGFβ1. In some embodiments, the anti-LAP antibody or antigen binding fragment thereof described herein inhibits (or is determined to inhibit) TGFβ1 activation by about 50% or more, e.g., by about 60% or more, by about 70% or more, by about 80% or more, or by about 90% or more, as assessed by ELISA, e.g., ELISA detection of free TGFβ1 in a culture of P3U1 cells overexpressing LAP-TGFβ1.

[0544] In some embodiments, the anti-LAP antibody or antigen binding fragment thereof described herein binds to mouse and human LAP-TGFβ1, as assessed by, e.g., flow cytometry of activated immune cell populations.

[0545] In some embodiments, the anti-LAP antibody or antigen binding fragment thereof described herein does not bind to free TGFβ1 (i.e., TGFβ1 without LAP), as assessed by, e.g., ELISA. In some embodiments, the anti-LAP antibody or antigen binding fragment thereof described herein does not bind to empty LAP (i.e., LAP that is not complexed with TGFβ1), as assessed by, e.g., bio-layer interferometry. For example, in some embodiments, the anti-LAP antibody or antigen binding fragment thereof described herein binds to free TGFβ1 or empty with a signal or affinity that is not significantly above the signal seen with a control antibody (e.g., isotype control) or the signal seen in the absence of anti-LAP antibody.

[0546] In some embodiments, the anti-LAP antibody or antigen binding fragment thereof described herein binds to human LAP-TGFβ1 comprising K27C and Y75C mutations (SEQ ID NO: 12. In another embodiment, the anti-LAP antibody or antigen binding fragment thereof described herein does not bind to (or are determined not to bind to) human LAP-TGFβ1 comprising a Y74T mutation (SEQ ID NO: 13). In another embodiment, the anti-LAP antibody or antigen binding fragment thereof described herein binds to (or is determined to bind to) human LAP-TGFβ1 comprising K27C and Y75C mutations, but not to LAP-TGFβ1 comprising a Y74T mutation.

[0547] In some embodiments, the anti-LAP antibodies bind to all or a portion of residues 82-130 of human LAP-TGFβ1 (SEQ ID NO: 1).

[0548] In some embodiments, the anti-LAP antibodies bind within residues 82-130 of human LAP-TGFβ1 (SEQ ID NO: 1). In some embodiments, the anti-LAP antibody or antigen binding fragment thereof binds to one or more regions on human LAP-TGFβ1 (SEQ ID NO: 1) comprising or consisting of amino acids 31-40, 274-280, and 340-343. In some embodiments, the anti-LAP antibody or antigen binding fragment thereof binds to amino acids 31-40, 274-280, and 340-343 of human LAP-TGFβ1 (SEQ ID NO: 1). In some embodiments, the epitope is determined by cryo-EM.

[0549] In some embodiments, the anti-LAP antibody or antigen binding fragment thereof binds to one or more regions on human a LAP-TGFβ1 (SEQ ID NO: 1) comprising or consisting of amino acids 31-38, 278-281, and 342-344. In some embodiments, the anti-LAP antibodies bind to amino acids 31-38, 278-281, and 342-344 of human LAP-TGFβ1 (SEQ ID NO: 1). In some embodiments, the epitope is determined by cryo-EM. In some embodiments, the anti-LAP antibody or antigen binding fragment thereof binds to one or more regions on human a LAP-TGFβ1 (SEQ ID NO: 1) comprising or consisting of amino acids 35-43, 272-275, 280-283, and 340 (SEQ ID NO: 1). In some embodiments, the anti-LAP antibody or antigen binding fragment thereof binds to amino acids 35-43, 272-275, 280-283, and 340 of human LAP-TGFβ1 (SEQ ID NO: 1). In some embodiments, the epitope is determined by cryo-EM. In various embodiments, the epitope is described in a Table herein, for example, Table 58.

[0550] As discussed above, the anti-LAP antibody or antigen binding fragment thereof described herein binds to LAP-TGFβ1 on cells, such as immune cells, e.g., immunosuppressive cells. Immunosuppressive cells include, but are not limited to, suppressive T cells (e.g., regulatory T cells, activated T cells, suppressive CD8+ T cells), M1 macrophages, M2 macrophages, dendritic cells, regulatory B cells, granulocytic MDSCs, and/or monocytic MDSCs, as assessed, e.g., by flow cytometry. In some embodiments, the anti-LAP antibody or antigen binding fragment thereof described herein binds to cells other than immune cells, such as tumor cells, fibroblasts (including cancer associated fibroblasts), mesenchymal stromal cells, mesenchymal stem cells, hemopoietic stem cells, non-myelinating Schwann cells, myofibroblasts, endothelial cells, platelets, megakaryocytes, pericytes, and/or hepatic stellate cells. In some embodiments, the anti-LAP antibody or antigen binding fragment thereof described herein binds to LAP-TGFβ1 on both immune cells (e.g., immunosuppressive cells) and non-immune cells.

[0551] In some embodiments, the anti-LAP antibody or antigen binding fragment thereof described herein binds to LAP-TGFβ1 on GARP-positive cells (e.g., GARP-positive immunosuppressive cells). In some embodiments, the anti-LAP antibody or antigen binding fragment thereof described herein binds to (or are determined to bind to) LAP-TGFβ1 on GARP-negative cells (e.g., GARP-negative immunosuppressive cells). In some embodiments, the anti-LAP antibody or antigen binding fragment thereof described herein binds to LAP-TGFβ1 on both GARP-positive and GARP-negative cells, as assessed, e.g., by flow cytometry.

[0552] In some embodiments, the anti-LAP antibody or antigen binding fragment thereof described herein reduces the endogenous expression of CD73. In some embodiments, the anti-LAP antibody or antigen binding fragment thereof described herein inhibits the increase of CD73 expression caused by a treatment, e.g., radiation. CD73 expression can be determined using standard methods known in the art.

[0553] In some embodiments, the anti-LAP antibody or antigen binding fragment thereof described herein binds to LAP-TGFβ1 expressed on cells (e.g., human or mouse LAP-TGFβ1 expressed on, e.g., P3U1 cells) with an EC₅₀ of 1000 nanogram per milliliter (ng/mL) or less, 500 ng/mL or less, 200 ng/mL or less, 150 ng/mL or less, 100 ng/mL or less, 50 ng/mL or less, 25 ng/mL or less, 10 ng/mL or less, 5 ng/mL or less, 2 ng/mL or less, 1 ng/mL to 200 ng/mL, 1 ng/mL to 150 ng/mL, 1 ng/mL to 100 ng/mL, 1 ng/mL to 50 ng/mL, 1 ng/mL to 25 ng/mL, 1 ng/mL to 10 ng/mL, or 1 ng/mL to 5 ng/mL, as measured by flow cytometry.

[0554] The binding of the anti-LAP antibody or antigen binding fragment thereof to LAP-TGFβ1 may also be defined using quantitative immunofluorescence by flow cytometry, which allows the number of antibody molecules bound per cell to be quantified. Accordingly, in some embodiments, the number of anti-LAP antibodies bound to a cell that also expresses GARP may be equal to the number of anti-GARP antibodies bound to that cell, or may be at least 80%, at least 50%, at least 20%, at least 10%, at least 5%, at least 1%, or at least 0.1% of the number of anti-GARP antibodies bound to that cell. In some embodiments, the number of LAP-TGFβ1 molecules expressed per cell may be quantified using quantitative immunofluorescence using an anti-LAP antibody of a group that detects the majority of LAP molecules; examples of such antibodies include 2F8, 2C9, 16B4 and the anti-LAP monoclonal antibody #27232 (R&D Systems). In some embodiments, the number of anti-LAP antibodies bound to the cell may be equal to the number of LAP molecules on the cell, or may be at least 80%, at least 50%, at least 20%, at least 10%, at least 5%, at least 1% or at least 0.1% of the number of LAP molecules expressed on that cell.

[0555] In some embodiments, the anti-LAP antibody or antigen binding fragment thereof described herein inhibits TGFβ1 activation by, for example, 10% or more, for example, 20% or more, 30% or more, 40% or more, 50% or more, 60% or more, 70% or more, 80% or more, 90% or more, or 95% or more, relative to a control (e.g., a control antibody), as measured by ELISA.

[0556] Preferably, the anti-LAP antibody or antigen binding fragment thereof described herein binds to soluble LAP-TGFβ1 with high affinity, for example, with a K_{D} of 10⁻⁷ M or less, 10⁻⁸ M or less, 10⁻⁹ M or less, 10⁻¹⁰ M or less, 10⁻¹¹ M or less, 10⁻¹² M or less, 10⁻¹² M to 10⁻⁷ M, 10⁻¹¹ M to 10⁻⁷ M, 10⁻¹⁰ M to 10⁻⁷ M, or 10⁻⁹ M to 10⁻⁷ M, as measured by bio-layer interferometry.

[0557] In some embodiments, the anti-LAP antibody or antigen binding fragment thereof described herein does not bind to LAP-TGFβ1 in the extracellular matrix. For example, the anti-LAP antibody or antigen binding fragment thereof described herein do not bind to LAP-TGFβ1 in the extracellular matrix, as assessed by ELISA, wherein the O.D. signal for the antibody or antigen binding fragment thereof binding is not significantly above the signal seen in the absence of the anti-LAP antibody or antigen binding fragment thereof described herein or the signal seen with a control antibody (e.g., isotype control).

[0558] In some embodiments, the anti-LAP antibody or antigen binding fragment thereof described herein do not inhibit TGFβ activation in the ECM, as assessed by, e.g., ELISA detection of free TGFβ1 in an assay combining a source of LAP-TGFβ1 in the ECM with MMP-2, MMP-9, thrombospondin or cells expressing αVβ6 or αVβ8 integrins.

[0559] In some embodiments, the anti-LAP antibody or antigen binding fragment thereof described herein binds to LAP-TGFβ1 on platelets. For example, in some embodiments, at least 5%, at least 10%, at least 20% or at least 50% of platelets can be detected by binding of the anti-LAP antibody (e.g. display a signal above that seen with an isotype control antibody) by flow cytometry. In some embodiments, the anti-LAP antibody or antigen binding fragment thereof described herein binds to platelets but do not cause platelet aggregation or platelet degranulation.

[0560] In some embodiments, the anti-LAP antibody or antigen binding fragment thereof described herein binds to immune cells, e.g., suppressive T cells (e.g., regulatory T cells), M2 macrophages, monocytic MDSCs, CD11b-positive cells, and/or dendritic cells. For example, in some embodiments, at least 0.5%, at least 1%, at least 2%, at least 5%, at least 7%, at least 10%, at least 20%, or at least 50% of these cell types can be detected by binding of the anti-LAP antibody (e.g. display a signal above that seen with an isotype control antibody) by flow cytometry. In some embodiments, the anti-LAP antibody or antigen binding fragment thereof described herein is considered to bind to these cell types if they bind ≥2 standard deviations above isotype control.

[0561] In some embodiments, the anti-LAP antibody or antigen binding fragment thereof described herein binds to GARP-negative leukocytes. For example, in some embodiments, at least 0.5%, at least 1%, at least 2%, at least 5%, at least 7%, at least 10%, at least 20% or at least 50% of GARP-negative leukocytes can be detected by binding of the anti-LAP antibody (e.g. display a signal above that seen with an isotype control antibody) by flow cytometry.

[0562] An antibody or antigen binding fragment thereof that exhibits one or more of the functional properties described above (e.g., biochemical, immunochemical, cellular, physiological or other biological activities), as determined using methods known to the art and described herein, will be understood to relate to a statistically significant difference in the particular activity relative to that seen in the absence of the antibody (e.g., or when a control antibody of irrelevant specificity is present). Preferably, the anti-LAP antibody-induced increases in a measured parameter effects a statistically significant increase by at least 10% of the measured parameter, more preferably by at least 20%, 30%, 40%, 50%, 60%, 70%, 80%, 90%, 95%, or 100% (i.e., 2-fold), 3-fold, 5-fold or 10-fold. Conversely, anti-LAP antibody-induced decreases in a measured parameter (e.g., TGFβ1 activation) effects a statistically significant decrease by at least 10%, 20%, 30%, 40%, 50%, 60%, 70%, 80%, 90%, 95%, 97%, 98%, 99%, or 100%.

[0563] Also provided herein are anti-LAP antibodies that bind to the same epitope on human LAP-TGFβ1 as any of the anti-LAP antibodies described herein. These antibodies have the ability to cross-compete for binding to human LAP-TGFβ1 with any of the anti-LAP antibodies described herein.

[0564] Antibodies disclosed herein include all known forms of antibodies and other protein scaffolds with antibody-like properties. For example, the antibody can be a human antibody, a humanized antibody, a bispecific antibody, an immunoconjugate, a chimeric antibody, or a protein scaffold with antibody-like properties, such as fibronectin or ankyrin repeats.

[0565] In some embodiments, the antibody is a bispecific antibody comprising a first and second binding region, wherein the first binding region comprises the binding specificity (e.g., antigen binding region) of an anti-LAP antibody described herein, and a second binding region that does not bind to LAP. In some embodiments, the second binding region binds to a protein that is not expressed on platelets.

[0566] The antibody also can be a Fab, F(ab′)₂, scFv, AFFIBODY, avimer, nanobody, single chain antibody, or a domain antibody. The antibody also can have any isotype, including any of the following isotypes: IgG1, IgG2, IgG3, IgG4, IgM, IgA1, IgA2, IgAsec, IgD, and IgE. Full-length antibodies can be prepared from VH and VL sequences using standard recombinant DNA techniques and nucleic acid encoding the desired constant region sequences to be operatively linked to the variable region sequences.

[0567] In certain embodiments, the antibodies described herein may have effector function or may have reduced or no effector function. In certain embodiments, anti-LAP antibodies comprise an effector-less or mostly effector-less Fc, e.g., IgG2 or IgG4. Generally, variable regions described herein may be linked to an Fc comprising one or more modification, typically to alter one or more functional properties of the antibody, such as serum half-life, complement fixation, Fc receptor binding, and/or antigen-dependent cellular cytotoxicity. Furthermore, an antibody described herein may be chemically modified (e.g., one or more chemical moieties can be attached to the antibody) or be modified to alter its glycosylation, to alter one or more functional properties of the antibody. Each of these embodiments is described in further detail below. The numbering of residues in the Fc region is that of the EU index of Kabat.

[0568] In some embodiments, the Fc region is a variant Fc region, e.g., an Fc sequence that has been modified (e.g., by amino acid substitution, deletion and/or insertion) relative to a parent Fc sequence (e.g., an unmodified Fc polypeptide that is subsequently modified to generate a variant), to provide desirable structural features and/or biological activity. For example, modifications can be made in the Fc region in order to generate an Fc variant that (a) has increased or decreased antibody-dependent cell-mediated cytotoxicity (ADCC), (b) increased or decreased complement mediated cytotoxicity (CDC), (c) has increased or decreased affinity for C1q and/or (d) has increased or decreased affinity for a Fc receptor relative to the parent Fc. Such Fc region variants will generally comprise at least one amino acid modification in the Fe region. Combining amino acid modifications is thought to be particularly desirable. For example, the variant Fc region may include two, three, four, five, etc. substitutions therein, e.g. of the specific Fc region positions identified herein.

[0569] A variant Fc region may also comprise a sequence alteration wherein amino acids involved in disulfide bond formation are removed or replaced with other amino acids. Such removal may avoid reaction with other cysteine-containing proteins present in the host cell used to produce the antibodies described herein. Even when cysteine residues are removed, single chain Fe domains can still form a dimeric Fe domain that is held together non-covalently. In other embodiments, the Fc region may be modified to make it more compatible with a selected host cell. For example, one may remove the PA sequence near the N-terminus of a typical native Fc region, which may be recognized by a digestive enzyme in E. coli such as proline iminopeptidase. In other embodiments, one or more glycosylation sites within the Fe domain may be removed. Residues that are typically glycosylated (e.g., asparagine) may confer cytolytic response. Such residues may be deleted or substituted with unglycosylated residues (e.g., alanine). In other embodiments, sites involved in interaction with complement, such as the C1q binding site, may be removed from the Fc region. For example, one may delete or substitute the EKK sequence of human IgG1. In certain embodiments, sites that affect binding to Fc receptors may be removed, preferably sites other than salvage receptor binding sites. In other embodiments, an Fc region may be modified to remove an ADCC site. ADCC sites are known in the art; see, for example, Molec. Immunol. 29 (5): 633-9 (1992) with regard to ADCC sites in IgG1. Specific examples of variant Fe domains are disclosed for example, in PCT Publication numbers WO 97/34631 and WO 96/32478.

[0570] In one embodiment, the hinge region of Fe is modified such that the number of cysteine residues in the hinge region is altered, e.g., increased or decreased. This approach is described further in U.S. Pat. No. 5,677,425 by Bodmer et al. More specifically, one or more amino acid mutations are introduced into the CH2-CH3 domain interface region of the Fc-hinge fragment thereof such that the antibody has impaired Staphylococcyl protein A (SpA) binding relative to native Fc-hinge domain SpA binding. This approach is described in further detail in U.S. Pat. No. 6,165,745 by Ward et al.

[0571] In yet other embodiments, the Fc region is altered by replacing at least one amino acid residue with a different amino acid residue to alter the effector function(s) of the antibody. For example, one or more amino acids selected from amino acid residues 234, 235, 236, 237, 297, 318, 320 and 322 can be replaced with a different amino acid residue such that the antibody has an altered affinity for an effector ligand but retains the antigen binding ability of the parent antibody. The effector ligand to which affinity is altered can be, for example, an Fc receptor or the C1 component of complement. This approach is described in further detail in U.S. Pat. Nos. 5,624,821 and 5,648,260, both by Winter et al. In another example, one or more amino acids selected from amino acid residues 329, 331 and 322 can be replaced with a different amino acid residue such that the antibody has altered C1q binding and/or reduced or abolished complement dependent cytotoxicity (CDC). This approach is described in further detail in U.S. Pat. No. 6,194,551 by Idusogie et al. In another example, one or more amino acid residues within amino acid positions 231 and 239 are altered to thereby alter the ability of the antibody to fix complement. This approach is described further in PCT Publication number WO 94/29351 by Bodmer et al.

[0572] In yet another example, the Fc region may be modified to increase antibody dependent cellular cytotoxicity (ADCC) and/or to increase the affinity for an Fcγ receptor by modifying one or more amino acids at the following positions: 234, 235, 236, 238, 239, 240, 241, 243, 244, 245, 247, 248, 249, 252, 254, 255, 256, 258, 262, 263, 264, 265, 267, 268, 269, 270, 272, 276, 278, 280, 283, 285, 286, 289, 290, 292, 293, 294, 295, 296, 298, 299, 301, 303, 305, 307, 309, 312, 313, 315, 320, 322, 324, 325, 326, 327, 329, 330, 331, 332, 333, 334, 335, 337, 338, 340, 360, 373, 376, 378, 382, 388, 389, 398, 414, 416, 419, 430, 433, 434, 435, 436, 437, 438 or 439. Exemplary substitutions include 236A, 239D, 239E, 268D, 267E, 268E, 268F, 324T, 332D, and 332E. Exemplary variants include 239D/332E, 236A/332E, 236A/239D/332E, 268F/324T, 267E/268F, 267E/324T, and 267E/268F/324T. Other modifications for enhancing FcγR and complement interactions include but are not limited to substitutions 298A, 333A, 334A, 326A, 2471, 339D, 339Q, 280H, 290S, 298D, 298V, 243L, 292P, 300L, 396L, 3051, and 396L. These and other modifications are reviewed in Strohl, 2009, Current Opinion in Biotechnology 20:685-691.

[0573] Fc modifications that increase binding to an Fcγ receptor include amino acid modifications at any one or more of amino acid positions 238, 239, 248, 249, 252, 254, 255, 256, 258, 265, 267, 268, 269, 270, 272, 279, 280, 283, 285, 298, 289, 290, 292, 293, 294, 295, 296, 298, 301, 303, 305, 307, 312, 315, 324, 327, 329, 330, 335, 337, 3338, 340, 360, 373, 376, 379, 382, 388, 389, 398, 414, 416, 419, 430, 434, 435, 437, 438 or 439 of the Fc region, wherein the numbering of the residues in the Fc region is that of the EU index as in Kabat (PCT Patent Publication number WO00/42072).

[0574] Other Fc modifications that can be made to Fcs are those for reducing or ablating binding to FcγR and/or complement proteins, thereby reducing or ablating Fc-mediated effector functions such as ADCC, ADCP, and CDC. Exemplary modifications include but are not limited substitutions, insertions, and deletions at positions 234, 235, 236, 237, 267, 269, 325, and 328, wherein numbering is according to the EU index. Exemplary substitutions include but are not limited to 234G, 235G, 236R, 237K, 267R, 269R, 325L, and 328R, wherein numbering is according to the EU index. An Fc variant may comprise 236R/328R. Other modifications for reducing FcγR and complement interactions include substitutions 297A, 234A, 235A, 237A, 318A, 228P, 236E, 268Q, 309L, 330S, 331 S, 220S, 226S, 229S, 238S, 233P, and 234V, as well as removal of the glycosylation at position 297 by mutational or enzymatic means or by production in organisms such as bacteria that do not glycosylate proteins. These and other modifications are reviewed in Strohl, 2009, Current Opinion in Biotechnology 20:685-691. Optionally, the Fc region may comprise a non-naturally occurring amino acid residue at additional and/or alternative positions known to one skilled in the art (see, e.g., U.S. Pat. Nos. 5,624,821; 6,277,375; 6,737,056; 6,194,551; 7,317,091; 8,101,720; PCT Patent Publication numbers WO 00/42072; WO 01/58957; WO 02/06919; WO 04/016750; WO 04/029207; WO 04/035752; WO 04/074455; WO 04/099249; WO 04/063351; WO 05/070963; WO 05/040217, WO 05/092925 and WO 06/020114).

[0575] Fc variants that enhance affinity for an inhibitory receptor FcγRIIb may also be used. Such variants may provide an Fc fusion protein with immunomodulatory activities related to FcγRIIb⁺ cells, including for example B cells and monocytes. In one embodiment, the Fc variants provide selectively enhanced affinity to FcγRIIb relative to one or more activating receptors. Modifications for altering binding to FcγRIIb include one or more modifications at a position selected from the group consisting of 234, 235, 236, 237, 239, 266, 267, 268, 325, 326, 327, 328, and 332, according to the EU index. Exemplary substitutions for enhancing FcγRllb affinity include but are not limited to 234D, 234E, 234F, 234W, 235D, 235F, 235R, 235Y, 236D, 236N, 237D, 237N, 239D, 239E, 266M, 267D, 267E, 268D, 268E, 327D, 327E, 328F, 328W, 328Y, and 332E. Exemplary substitutions include 235Y, 236D, 239D, 266M, 267E, 268D, 268E, 328F, 328W, and 328Y. Other Fc variants for enhancing binding to FcγRIIb include 235Y/267E, 236D/267E, 239D/268D, 239D/267E, 267E/268D, 267E/268E, and 267E/328F.

[0576] In certain embodiments, the antibody is modified to increase its biological half-life. Various approaches are possible. For example, this may be done by increasing the binding affinity of the Fc region for FcRn. For example, one or more of more of following residues can be mutated: 252, 254, 256, 433, 435, 436, as described in U.S. Pat. No. 6,277,375. Specific exemplary substitutions include one or more of the following: T252L, T254S, and/or T256F. Alternatively, to increase the biological half-life, the antibody can be altered within the CH1 or CL region to contain a salvage receptor binding epitope taken from two loops of a CH2 domain of an Fc region of an IgG, as described in U.S. Pat. Nos. 5,869,046 and 6,121,022 by Presta et al. Other exemplary variants that increase binding to FcRn and/or improve pharmacokinetic properties include substitutions at positions 259, 308, 428, and 434, including for example 2591, 308F, 428L, 428M, 434S, 434H, 434F, 434Y, and 434M. Other variants that increase Fc binding to FcRn include: 250E, 250Q, 428L, 428F, 250Q/428L (Hinton et al., 2004, J. Biol. Chem. 279(8): 6213-6216, Hinton et al. 2006 Journal of Immunology 176:346-356), 256A, 272A, 286A, 305A, 307A, 307Q, 31 1A, 312A, 376A, 378Q, 380A, 382A, 434A (Shields et al, Journal of Biological Chemistry, 2001, 276(9):6591-6604), 252F, 252T, 252Y, 252W, 254T, 256S, 256R, 256Q, 256E, 256D, 256T, 309P, 31 1 S, 433R, 433S, 4331, 433P, 433Q, 434H, 434F, 434Y, 252Y/254T/256E, 433K/434F/436H, 308T/309P/311S (Dall Acqua et al. Journal of Immunology, 2002, 169:5171-5180, Dall'Acqua et al., 2006, Journal of Biological Chemistry 281:23514-23524). Other modifications for modulating FcRn binding are described in Yeung et al., 2010, J Immunol, 182:7663-7671. In certain embodiments, hybrid IgG isotypes with particular biological characteristics may be used. For example, an IgG1/IgG3 hybrid variant may be constructed by substituting IgG1 positions in the CH2 and/or CH3 region with the amino acids from IgG3 at positions where the two isotypes differ. Thus, a hybrid variant IgG antibody may be constructed that comprises one or more substitutions, e.g., 274Q, 276K, 300F, 339T, 356E, 358M, 384S, 392N, 397M, 4221, 435R, and 436F. In other embodiments described herein, an IgG1/IgG2 hybrid variant may be constructed by substituting IgG2 positions in the CH2 and/or CH3 region with amino acids from IgG1 at positions where the two isotypes differ. Thus a hybrid variant IgG antibody may be constructed that comprises one or more substitutions, e.g., one or more of the following amino acid substitutions: 233E, 234L, 235L, −236G (referring to an insertion of a glycine at position 236), and 327A.

[0577] Moreover, the binding sites on human IgG1 for FcγR1, FcγRII, FcγRIII and FcRn have been mapped and variants with improved binding have been described (see Shields, R. L. et al. (2001) J. Biol. Chem. 276:6591-6604). Specific mutations at positions 256, 290, 298, 333, 334 and 339 were shown to improve binding to FcγRIII. Additionally, the following combination mutants were shown to improve FcγRIII binding: T256A/S298A, S298A/E333A, S298A/K224A and S298A/E333A/K334A, which has been shown to exhibit enhanced FcγRIIIa binding and ADCC activity (Shields et al., 2001). Other IgG1 variants with strongly enhanced binding to FcγRIIIa have been identified, including variants with S239D/I332E and S239D/I332E/A330L mutations which showed the greatest increase in affinity for FcγRIIIa, a decrease in FcγRIIb binding, and strong cytotoxic activity in cynomolgus monkeys (Lazar et al., 2006). Introduction of the triple mutations into antibodies such as alemtuzumab (CD52-specific), trastuzumab (HER2/neu-specific), rituximab (CD20-specific), and cetuximab (EGFR-specific) translated into greatly enhanced ADCC activity in vitro, and the S239D/I332E variant showed an enhanced capacity to deplete B cells in monkeys (Lazar et al., 2006). In addition, IgG1 mutants containing L235V, F243L, R292P, Y300L and P396L mutations which exhibited enhanced binding to FcγRIIIa and concomitantly enhanced ADCC activity in transgenic mice expressing human FcγRIIIa in models of B cell malignancies and breast cancer have been identified (Stavenhagen et al., 2007; Nordstrom et al., 2011). Other Fc mutants that may be used include: S298A/E333A/L334A, S239D/1332E, S239D/1332E/A330L, L235V/F243L/R292P/Y300L/P396L, and M428L/N434S.

[0578] When using an IgG4 constant domain, it is usually preferable to include the substitution S228P, which mimics the hinge sequence in IgG1 and thereby stabilizes IgG4 molecules.

[0579] In still another embodiment, the glycosylation of an antibody is modified. For example, an aglycoslated antibody can be made (i.e., the antibody lacks glycosylation). Glycosylation can be altered to, for example, increase the affinity of the antibody for antigen. Such carbohydrate modifications can be accomplished by, for example, altering one or more sites of glycosylation within the antibody sequence. For example, one or more amino acid substitutions can be made that result in elimination of one or more variable region framework glycosylation sites to thereby eliminate glycosylation at that site. Such aglycosylation may increase the affinity of the antibody for antigen. Such an approach is described in further detail in U.S. Pat. Nos. 5,714,350 and 6,350,861 by Co et al. Glycosylation of the constant region on N297 may be prevented by mutating the N297 residue to another residue, e.g., N297A, and/or by mutating an adjacent amino acid, e.g., 298 to thereby reduce glycosylation on N297.

[0580] Additionally, or alternatively, an antibody can be made that has an altered type of glycosylation, such as a hypofucosylated antibody having reduced amounts of fucosyl residues or an antibody having increased bisecting GlcNac structures. Such altered glycosylation patterns have been demonstrated to increase the ADCC ability of antibodies. Such carbohydrate modifications can be accomplished by, for example, expressing the antibody in a host cell with altered glycosylation machinery. Cells with altered glycosylation machinery have been described in the art and can be used as host cells in which to express recombinant antibodies described herein to thereby produce an antibody with altered glycosylation. For example, EP 1,176,195 by Hanai et al. describes a cell line with a functionally disrupted FUT8 gene, which encodes a fucosyl transferase, such that antibodies expressed in such a cell line exhibit hypofucosylation. PCT Publication number WO 03/035835 by Presta describes a variant CHO cell line, Lec13 cells, with reduced ability to attach fucose to Asn(297)-linked carbohydrates, also resulting in hypofucosylation of antibodies expressed in that host cell (see also Shields, R. L. et al. (2002) J. Biol. Chem. 277:26733-26740). PCT Publication number WO 99/54342 by Umana et al. describes cell lines engineered to express glycoprotein-modifying glycosyl transferases (e.g., beta(1,4)-N-acetylglucosaminyltransferase III (GnTIII)) such that antibodies expressed in the engineered cell lines exhibit increased bisecting GlcNac structures which results in increased ADCC activity of the antibodies (see also Umana et al. (1999) Nat. Biotech. 17:176-180).

[0581] Another modification of the antibodies described herein is pegylation. An antibody can be pegylated to, for example, increase the biological (e.g., serum) half-life of the antibody. To pegylate an antibody, the antibody, or fragment thereof, typically is reacted with polyethylene glycol (PEG), such as a reactive ester or aldehyde derivative of PEG, under conditions in which one or more PEG groups become attached to the antibody or antibody fragment thereof. Preferably, the pegylation is carried out via an acylation reaction or an alkylation reaction with a reactive PEG molecule (or an analogous reactive water-soluble polymer). As used herein, the term “polyethylene glycol” is intended to encompass any of the forms of PEG that have been used to derivatize other proteins, such as mono (C1-C10) alkoxy- or aryloxy-polyethylene glycol or polyethylene glycol-maleimide. In certain embodiments, the antibody to be pegylated is an aglycosylated antibody. Methods for pegylating proteins are known in the art and can be applied to the antibodies described herein. See for example, European patent number EP 0 154 316 by Nishimura et al. and European patent number EP 0 401 384 by Ishikawa et al.

[0582] The affinities and binding properties of an Fc region for its ligand may be determined by a variety of in vitro assay methods (biochemical or immunological based assays) known in the art including, but not limited to, equilibrium methods (e.g., enzyme-linked immunosorbent assay (ELISA), or radioimmunoassay (RIA)), or kinetics (e.g., BIACORE analysis), and other methods such as indirect binding assays, competitive inhibition assays, fluorescence resonance energy transfer (FRET), gel electrophoresis, and chromatography (e.g., gel filtration). These and other methods may utilize a label on one or more of the components being examined and/or employ a variety of detection methods including but not limited to chromogenic, fluorescent, luminescent, or isotopic labels. A detailed description of binding affinities and kinetics can be found in Paul, W. E., ed., Fundamental Immunology, 4th Ed., Lippincott-Raven, Philadelphia (1999), which focuses on antibody-immunogen interactions.

II. Antibodies which Bind to Same Epitope as or Cross-Compete with Anti-LAP Antibodies

[0583] Anti-LAP antibodies which bind to the same or similar epitopes to the antibodies disclosed herein (and thus also cross-compete with the antibodies disclosed herein) may be raised using immunization protocols. The resulting antibodies can be screened for high affinity binding to human LAP-TGFβ1. Selected antibodies can then be studied, e.g., in yeast display assay in which sequence variants of LAP-TGFβ1 are presented on the surface of yeast cells, or by hydrogen-deuterium exchange experiments, to determine the precise epitope bound by the antibody.

[0584] Antibodies which bind to the same epitope as the anti-LAP antibodies described herein can also be generated using chimeric constructs, e.g., chicken-human chimeras of LAP-TGFβ1. Since human and chicken sequences can be combined to yield a LAP-TGFβ1 protein that folds correctly, the method can be used to generate immunogens to specific epitopes of interest on LAP-TGFβ1. With this strategy, the majority of the sequence would be taken from chicken LAP-TGFβ1, with small sections of human LAP-TGFβ1 inserted in regions containing the desired epitope. Exemplary epitopes on LAP-TGFβ1 that can be targeted using this strategy include, for example, the lower arm of LAP-TGFβ1, the latency loop of LAP-TGFβ1, or an epitope comprising amino acids 82-130 of human LAP-TGFβ1. This chimeric protein could be used to immunize chickens to yield monoclonal antibodies. Since the chicken LAP-TGFβ1 would be recognized as self, the immune response will be focused on the human sequence. Antibodies generated using this approach can be tested for various functions/properties (e.g., binding to LAP-TGFβ1, inhibiting TGFβ1 activation, binding to ECM, binding to cells such as immunosuppressive cells) using standard methods known in the art, e.g., the methods described herein.

[0585] The epitope to which an antibody binds can be determined using art-recognized methods. An anti-LAP antibody is considered to bind to the same epitope as a reference anti-LAP antibody if it, e.g., contacts one or more of the same residues on human LAP-TGFβ1 as the reference antibody; contacts one or more of the same residues within at least one region of human LAP-TGFβ1 as the reference antibody; contacts a majority of residues within at least one region of human LAP-TGFβ1 as the reference antibody; contacts a majority of the same residues within each region of human LAP-TGFβ1 as the reference antibody; contacts a majority of the same residues along the entire length of human LAP-TGFβ1 as the reference antibody; contacts all of the same distinct regions of human LAP-TGFβ1 as the reference antibody; contacts all of the same residues at any one region on human LAP-TGFβ1 as the reference antibody; or contacts all of the same residues at all of the same regions of human LAP-TGFβ1 as the reference antibody.

[0586] Techniques for determining antibodies that bind to the “same epitope on human LAP-TGFβ1” with the anti-LAP antibodies described herein include x-ray analyses of crystals of antigen:antibody complexes, which provides atomic resolution of the epitope. Other methods monitor the binding of the antibody to antigen binding fragments thereof or mutated variations of the antigen where loss of binding due to an amino acid modification within the antigen sequence indicates the epitope component. Methods may also rely on the ability of an antibody of interest to affinity isolate specific short peptides (either in native three-dimensional form or in denatured form) from combinatorial phage display peptide libraries or from a protease digest of the target protein. The peptides are then regarded as leads for the definition of the epitope corresponding to the antibody used to screen the peptide library. For epitope mapping, computational algorithms have also been developed that have been shown to map conformational discontinuous epitopes.

[0587] The epitope or region comprising the epitope can also be identified by screening for binding to a series of overlapping peptides spanning human LAP-TGFβ1. Alternatively, the method of Jespers et al. (1994) Biotechnology 12:899 may be used to guide the selection of antibodies having the same epitope and therefore similar properties to the anti-LAP antibodies described herein. Using phage display, first, the heavy chain of the anti-LAP antibody is paired with a repertoire of (e.g., human) light chains to select a LAP-binding antibody, and then the new light chain is paired with a repertoire of (e.g., human) heavy chains to select a (e.g., human) LAP-binding antibody having the same epitope or epitope region as an anti-LAP antibody described herein. Alternatively, variants of an antibody described herein can be obtained by mutagenesis of cDNA sequences encoding the heavy and light chains of the antibody.

[0588] Alanine scanning mutagenesis, as described by Cunningham & Wells (1989) Science 244: 1081, or some other form of point mutagenesis of amino acid residues in LAP-TGFβ1 may also be used to determine the functional epitope for an anti-LAP antibody.

[0589] The epitope or epitope region (an “epitope region” is a region comprising the epitope or overlapping with the epitope) bound by a specific antibody may also be determined by assessing binding of the antibody to peptides comprising LAP-TGFβ1 fragments. A series of overlapping peptides encompassing the LAP-TGFβ1 sequence may be synthesized and screened for binding, e.g. in a direct ELISA, a competitive ELISA (where the peptide is assessed for its ability to prevent binding of an antibody to LAP-TGFβ1 bound to a well of a microtiter plate), or on a chip. Such peptide screening methods may not be capable of detecting some discontinuous functional epitopes.

[0590] An epitope may also be identified by MS-based protein foot printing, such as HDX-MS and Fast Photochemical Oxidation of Proteins (FPOP), structural methods such as X-ray crystal structure determination, molecular modeling, and nuclear magnetic resonance spectroscopy.

[0591] Single particle cryo electron microscopy (SP-Cryo-EM) can also be used to identify the epitope to which an antibody or antigen binding fragment thereof binds. SP-Cryo-EM is a technique for macromolecular structure analysis which uses a high intensity electron beam to image biological specimens in their native environment at cryogenic temperature. In recent years, SP-cryo-EM has emerged as a complementary technique to crystallography and NMR for determining near-atomic level structures suitable for application in drug discovery (Renaud et al. Nat Rev Drug Discov 2018; 17:471-92; Scapin et al. Cell Chem Biol 2018; 25:1318-25; Ceska et al. Biochemical Society Transactions 2019: p. BST20180267). In addition to high resolution information, SP-Cryo-EM has the further advantage of allowing access to larger and more complex biological systems, with the possibility of characterizing multiple conformational or compositional solution states from the same sample, providing insights into more biologically relevant states of the macromolecule. For imaging, a small volume of sample (e.g., 3 μl aliquot) is applied onto a grid and flash-frozen in a liquid ethane bath. The frozen grid is then loaded into the microscope and hundreds to thousands of images of different areas of the grids are collected. These images contain two-dimensional projections of the biological macromolecule (particles): using mathematical tools and GPU powered algorithms, the particles are identified, extracted, and classified; in the subsequent step, the different classes are used to compute one or more 3D reconstructions, corresponding to different conformations, oligomerization or binding states if they coexist in the same sample. The individual reconstructions can then be refined to high resolution.

### III. Nucleic Acid Molecules

[0592] Also provided herein are nucleic acid molecules that encode the anti-LAP antibodies or antigen binding fragments thereof described herein. The nucleic acids may be present in whole cells, in a cell lysate, or in a partially purified or substantially pure form. A nucleic acid described herein can be, for example, DNA or RNA and may or may not contain intronic sequences. In certain embodiments, the nucleic acid is a cDNA molecule. The nucleic acids described herein can be obtained using standard molecular biology techniques. For antibodies expressed by hybridomas (e.g., hybridomas prepared from transgenic mice carrying human immunoglobulin genes as described further below), cDNAs encoding the light and heavy chains of the antibody made by the hybridoma can be obtained by standard PCR amplification or cDNA cloning techniques. For antibodies obtained from an immunoglobulin gene library (e.g., using phage display techniques), nucleic acid encoding the antibody can be recovered from the library.

[0593] In some embodiments, provided herein are nucleic acid molecules that encode the VH and/or VL sequences, or heavy and/or light chain sequences, of any of the anti-LAP antibodies or antigen binding fragments thereof described herein. Host cells comprising the nucleotide sequences (e.g., nucleic acid molecules) described herein are encompassed herein. Once DNA fragments encoding VH and VL segments are obtained, these DNA fragments can be further manipulated by standard recombinant DNA techniques, for example to convert the variable region genes to full-length antibody chain genes, to Fab fragment genes or to a scFv gene. In these manipulations, a VL- or VH-encoding DNA fragment is operatively linked to another DNA fragment encoding another protein, such as an antibody constant region or a flexible linker. The term “operatively linked”, as used in this context, is intended to mean that the two DNA fragments are joined such that the amino acid sequences encoded by the two DNA fragments remain in-frame.

[0594] The isolated DNA encoding the VH region can be converted to a full-length heavy chain gene by operatively linking the VH-encoding DNA to another DNA molecule encoding heavy chain constant regions (hinge, CH1, CH2 and/or CH3). The sequences of human heavy chain constant region genes are known in the art (see e.g., Kabat, E. A., et al. (1991) Sequences of Proteins of Immunological Interest, Fifth Edition, U.S. Department of Health and Human Services, NIH Publication No. 91-3242) and DNA fragments encompassing these regions can be obtained by standard PCR amplification.

[0595] The isolated DNA encoding the VL region can be converted to a full-length light chain gene (as well as a Fab light chain gene) by operatively linking the VL-encoding DNA to another DNA molecule encoding the light chain constant region, CL. The sequences of human light chain constant region genes are known in the art (see e.g., Kabat, E. A., et al. (1991) Sequences of Proteins of Immunological Interest, Fifth Edition, U.S. Department of Health and Human Services, NIH Publication No. 91-3242) and DNA fragments encompassing these regions can be obtained by standard PCR amplification. The light chain constant region can be a kappa or lambda constant region.

[0596] Also provided herein are nucleic acid molecules with conservative substitutions that do not alter the resulting amino acid sequence upon translation of the nucleic acid molecule.

Iv. Methods of Production

[0597] Monoclonal antibodies can be prepared using a wide variety of techniques known in the art including the use of hybridoma, recombinant, and phage display technologies, or a combination thereof.

[0598] Various methods for making monoclonal antibodies described herein are available in the art. For example, the monoclonal antibodies can be made using the hybridoma method first described by Kohler et al., Nature, 256:495 (1975), or any later developments thereof, or by recombinant DNA methods (U.S. Pat. No. 4,816,567). For example, monoclonal antibodies can be produced using hybridoma techniques including those known in the art and taught, for example, in Harlow et al, Antibodies: A Laboratory Manual, (Cold Spring Harbor Laboratory Press, 2nd ed., 1988); Hammer-ling, et al., in: Monoclonal Antibodies and T-Cell Hybridomas 563-681 (Elsevier, N.Y., 1981) (said references incorporated by reference in their entireties). Methods for producing and screening for specific antibodies using hybridoma technology are routine and well known in the art. In another example, antibodies useful in the methods and compositions described herein can also be generated using various phage display methods known in the art, such as isolation from antibody phage libraries generated using the techniques described in McCafferty et al., Nature, 348:552-554 (1990). Clackson et al., Nature, 352:624-628 (1991) and Marks et al., J. Mol. Biol, 222:581-597 (1991) describe the isolation of murine and human antibodies, respectively, using phage libraries. Subsequent publications describe the production of high affinity (e.g., nM range) human antibodies by chain shuffling (Marks et al., Bio/Technology, 10:779-783 (1992)), as well as combinatorial infection and in vivo recombination as a strategy for constructing very large phage libraries (Waterhouse et al., Nuc. Acids. Res., 21:2265-2266 (1993)). Thus, these techniques are viable alternatives to traditional monoclonal antibody hybridoma techniques for isolation of monoclonal antibodies.

[0599] Human antibodies can be made by a variety of methods known in the art, including phage display methods described above using antibody libraries derived from human immunoglobulin sequences. See also, U.S. Pat. Nos. 4,444,887 and 4,716,111; and PCT publication numbers WO 98/46645, WO 98/50433, WO 98/24893, WO 98/16654, WO 96/34096, WO 96/33735, and WO 91/10741, the contents of which are herein incorporated by reference in their entireties. Human antibodies can also be produced using transgenic mice which express human immunoglobulin genes, and upon immunization are capable of producing a full repertoire of human antibodies in the absence of endogenous immunoglobulin production. For an overview of this technology for producing human antibodies, see, Lonberg and Huszar, 1995, Int. Rev. Immunol. 13:65-93. Phage display technology (McCafferty et al., Nature 348:552-553 (1990)) also can be used to produce human antibodies and antibody binding fragments thereof in vitro, from immunoglobulin variable (V) domain gene repertoires from unimmunized donors. Human antibodies can also be generated by in vitro activated B cells (see U.S. Pat. Nos. 5,567,610 and 5,229,275, the contents of which are herein incorporated by reference in their entireties). Completely human antibodies which recognize a selected epitope can be generated using a technique referred to as “guided selection.” In this approach a selected non-human monoclonal antibody, e.g., a mouse antibody, is used to guide the selection of a completely human antibody recognizing the same epitope (Jespers et al., 1994, Bio/technology 12:899-903).

[0600] Chimeric antibodies can be prepared based on the sequence of a murine monoclonal antibody. DNA encoding the heavy and light chain immunoglobulins can be obtained from the murine hybridoma of interest and engineered to contain non-murine (e.g., human) immunoglobulin sequences using standard molecular biology techniques. For example, to create a chimeric antibody, the murine variable regions can be linked to human constant regions using methods known in the art (see e.g., U.S. Pat. No. 4,816,567 to Cabilly et al.).

[0601] Humanized forms of anti-LAP antibodies (e.g., humanized affinity matured forms of mouse anti-LAP antibodies) are chimeric antibodies which contain minimal sequence derived from non-human immunoglobulin. Humanized antibodies are typically human immunoglobulins (recipient antibody) in which residues from a CDR or hypervariable region of the recipient are replaced by residues from a CDR or hypervariable region of a non-human species (donor antibody) such as mouse, rat, rabbit or nonhuman primate having the desired specificity, affinity, and capacity. In some instances, Fv framework region (FR) residues of the human immunoglobulin are replaced by corresponding non-human residues. Humanized antibodies can comprise residues which are not found in the recipient antibody or in the donor antibody. These modifications are made to further refine antibody performance. In general, the humanized antibody will comprise substantially all of at least one, and typically two, variable domains, in which all or substantially all of the hypervariable loops correspond to those of a non-human immunoglobulin and all or substantially all of the FR regions are those of a human immunoglobulin consensus sequence. The humanized antibody optionally also will comprise at least a portion of an immunoglobulin constant region (Fc), typically that of a human immunoglobulin. For further details, see Jones et al., Nature 321:522-525 (1986); Riechmann et al., Nature 332:323-329 (1988); and Presta, Curr. Op. Struct. Biol. 2:593-596 (1992).

[0602] The framework and CDR regions of a humanized antibody need not correspond precisely to the parental sequences, e.g., the donor antibody CDR or the consensus framework can be mutagenized by substitution, insertion and/or deletion of at least one amino acid residue so that the CDR or framework residue at that site does not correspond exactly to either the donor antibody or the consensus framework. As used herein, the term “consensus framework” refers to the framework region in the consensus immunoglobulin sequence. As used herein, the term “consensus immunoglobulin sequence” refers to the sequence formed from the most frequently occurring amino acids (or nucleotides) in a family of related immunoglobulin sequences (see e.g., Winnaker, From Genes to Clones (Veriagsgesellschaft, Weinheim, Germany 1987). In a family of immunoglobulins, each position in the consensus sequence is occupied by the amino acid occurring most frequently at that position in the family. Where two amino acids occur equally frequently, either can be included in the consensus sequence. As used herein, “Vernier zone” refers to a subset of framework residues that may adjust CDR structure and fine-tune the fit to antigen as described by Foote and Winter (1992, J. Mol. Biol. 224:487-499, which is incorporated herein by reference). Vernier zone residues form a layer underlying the CDRs and can impact on the structure of CDRs and the affinity of the antibody. Human immunoglobulin (Ig) sequences that can be used as a recipient are well known in the art.

[0603] Framework residues in the human framework regions can be substituted with the corresponding residue from the CDR donor antibody to alter, preferably improve, antigen binding. These framework substitutions are identified by methods well known in the art, e.g., by modeling of the interactions of the CDR and framework residues to identify framework residues important for antigen binding and sequence comparison to identify unusual framework residues at particular positions. (See, e.g., Queen et al., U.S. Pat. No. 5,585,089; Riechmann et al., Nature 332:323 (1988), which are incorporated herein by reference in their entireties.) Three-dimensional immunoglobulin models are commonly available and are familiar to those skilled in the art. Computer programs are available which illustrate and display probable three-dimensional conformational structures of selected candidate immunoglobulin sequences. Inspection of these displays permits analysis of the likely role of the residues in the functioning of the candidate immunoglobulin sequence, i.e., the analysis of residues that influence the ability of the candidate immunoglobulin to bind its antigen. In this way, FR residues can be selected and combined from the consensus and import sequences so that the desired antibody characteristic, such as increased affinity for the target antigen(s), is achieved. In general, the CDR residues are directly and most substantially involved in influencing antigen binding. Antibodies can be humanized using a variety of techniques known in the art, including, but not limited to, those described in Jones et al., Nature 321:522 (1986); Verhoeyen et al., Science 239: 1534 (1988), Sims et al., J. Immunol. 151: 2296 (1993); Chothia and Lesk, J. Mol. Biol. 196:901 (1987), Carter et al., Proc. Natl. Acad. Sci. U.S.A. 89:4285 (1992); Presta et al., J. Immunol. 151:2623 (1993), Padlan, Molecular Immunology 28(4/5):489-498 (1991); Studnicka et al., Protein Engineering 7(6):805-814 (1994); Roguska. et al., PNAS 91:969-973 (1994); PCT publication number WO 91/09967, PCT/: US98/16280, US96/18978, US91/09630, US91/05939, US94/01234, GB89/01334, GB91/01134, GB92/01755; WO90/14443, WO90/14424, WO90/14430, EP 229246, EP 592,106; EP 519,596, EP 239,400, U.S. Pat. Nos. 5,565,332, 5,723,323, 5,976,862, 5,824,514, 5,817,483, 5,814,476, 5,763,192, 5,723,323, 5,766,886, 5,714,352, 6,204,023, 6,180,370, 5,693,762, 5,530, 101, 5,585,089, 5,225,539; 4,816,567, each entirely incorporated herein by reference.

[0604] The anti-LAP antibodies generated using the methods described above can be tested for desired functions, such as particular binding specificities, binding affinities, targeted cell populations, using methods known in the art and described in the Examples, for example, art-recognized protein-protein binding assays, biochemical screening assays, immunoassays, and cell-based assays. An aspect of the invention provides molecules that may be used to screen for an antibody or antigen binding fragment thereof that binds LAP, a complex comprising LAP, and/or a complex comprising LAP-TGFβ1. For example, the molecules in Table 2 or Table 3 or molecules having the amino acid sequence of any of SEQ ID NO: 1 or variants thereof are used to screen or determine binding of at least one binding protein. In various embodiments, the at least one molecule in Table 2 and/or Table 3 are used to screen or determine binding of at least one antibody or antigen binding fragment thereof.

[0605] Exemplary assays include, but are not limited to, immunoprecipitation or by an in vitro binding assay, such as radioimmunoassay (RIA), FACS, enzyme-linked immunoabsorbent assay (ELISA), bio-layer interferometry (e.g., ForteBio assay), and Scatchard analysis.

### Antibody Engineering

[0606] Further included are embodiments in which the anti-LAP antibodies or antigen-binding fragments thereof described herein (e.g., antibodies or antigen binding fragments thereof in Tables 4, 6, 8, 11-43, and 45) are engineered antibodies to include modifications to framework residues within the variable domains of the parental monoclonal antibody, e.g., to improve the properties of the antibody or antigen binding fragment thereof. Typically, such framework modifications are made to decrease the immunogenicity of the antibody or antigen binding fragment thereof. This is usually accomplished by replacing non-CDR residues in the variable domains (i.e., framework residues) in a parental (e.g., rodent) antibody or antigen binding fragment thereof with analogous residues from the immune repertoire of the species in which the antibody is to be used, e.g., human residues in the case of human therapeutics. Such an antibody or antigen binding fragment thereof is referred to as a “humanized” antibody or antigen binding fragment thereof. In some cases, it is desirable to increase the affinity, or alter the specificity of an engineered (e.g., humanized) antibody. One approach is to “backmutate” one or more framework residues to the corresponding germline sequence. More specifically, an antibody or antigen binding fragment thereof that has undergone somatic mutation can contain framework residues that differ from the germline sequence from which the antibody is derived. Such residues can be identified by comparing the antibody or antigen binding fragment thereof framework sequences to the germline sequences from which the antibody or antigen binding fragment thereof is derived. Another approach is to revert to the original parental (e.g., rodent) residue at one or more positions of the engineered (e.g. humanized) antibody, e.g. to restore binding affinity that may have been lost in the process of replacing the framework residues. (See, e.g., U.S. Pat. Nos. 5,693,762, 5,585,089 and 5,530,101.)

[0607] In certain embodiments, the anti-LAP antibodies and antigen binding fragments thereof are engineered (e.g., humanized) to include modifications in the framework and/or CDRs to improve their properties. Such engineered changes can be based on molecular modeling. A molecular model for the variable region for the parental (non-human) antibody sequence can be constructed to understand the structural features of the antibody and used to identify potential regions on the antibody that can interact with the antigen. Conventional CDRs are based on alignment of immunoglobulin sequences and identifying variable regions. Kabat et al., (1991) Sequences of Proteins of Immunological Interest, Kabat, et al.; National Institutes of Health, Bethesda, Md.; 5^{th} ed.; NIH Publ. No. 91-3242; Kabat (1978) Adv. Prot. Chem. 32:1-75; Kabat, et al., (1977) J. Biol. Chem. 252:6609-6616. Chothia and coworkers carefully examined conformations of the loops in crystal structures of antibodies and proposed hypervariable loops. Chothia, et al., (1987) J Mol. Biol. 196:901-917 or Chothia, et al., (1989) Nature 342:878-883. There are variations between regions classified as “CDRs” and “hypervariable loops”. Later studies (Raghunathan et al., (2012) J. Mol Recog. 25, 3, 103-113) analyzed several antibody-antigen crystal complexes and observed that the antigen binding regions in antibodies do not necessarily conform strictly to the “CDR” residues or “hypervariable” loops. The molecular model for the variable region of the non-human antibody can be used to guide the selection of regions that can potentially bind to the antigen. In practice, the potential antigen binding regions based on model differ from the conventional “CDR” s or “hyper variable” loops. Commercial scientific software such as MOE(Chemical Computing Group) can be used for molecular modeling. Human frameworks can be selected based on best matches with the non-human sequence both in the frameworks and in the CDRs. For FR4 (framework 4) in VH, VJ regions for the human germlines are compared with the corresponding non-human region. In the case of FR4 (framework 4) in VL, J-kappa and J-Lambda regions of human germline sequences are compared with the corresponding non-human region. Once suitable human frameworks are identified, the CDRs are grafted into the selected human frameworks. In some cases, certain residues in the VL-VH interface can be retained as in the non-human (parental) sequence. Molecular models can also be used for identifying residues that can potentially alter the CDR conformations and hence binding to antigen. In some cases, these residues are retained as in the non-human (parental) sequence. Molecular models can also be used to identify solvent exposed amino acids that can result in unwanted effects such as glycosylation, deamidation and oxidation. Developability filters can be introduced early on in the design stage to eliminate/minimize these potential problems.

[0608] Another type of framework modification involves mutating one or more residues within the framework region, or even within one or more CDR regions, to remove T cell epitopes to thereby reduce the potential immunogenicity of the antibody. This approach is also referred to as “deimmunization” and is described in further detail in U.S. Pat. No. 7,125,689.

[0609] In particular embodiments, it will be desirable to change certain amino acids containing exposed side-chains to another amino acid residue in order to provide for greater chemical stability of the final antibody, so as to avoid deamidation or isomerization. The deamidation of asparagine may occur on NG, DG, NG, NS, NA, NT, QG or QS sequences and result in the creation of an isoaspartic acid residue that introduces a kink into the polypeptide chain and decreases its stability (isoaspartic acid effect). Isomerization can occur at DG, DS, DA or DT sequences. In certain embodiments, the antibodies of the present disclosure do not contain deamidation or asparagine isomerism sites. For example, an asparagine (Asn) residue may be changed to Gln or Ala to reduce the potential for formation of isoaspartate at any Asn-Gly sequences, particularly within a CDR.

[0610] A similar problem may occur at an Asp-Gly sequence. Reissner and Aswad (2003) Cell. Mol. Life Sci. 60:1281. Isoaspartate formation may debilitate or completely abrogate binding of an antibody to its target antigen. See, Presta (2005) J. Allergy Clin. Immunol. 116:731 at 734. In various embodiment, the asparagine is changed to glutamine (Gln). It may also be desirable to alter an amino acid adjacent to an asparagine (Asn) or glutamine (Gln) residue to reduce the likelihood of deamidation, which occurs at greater rates when small amino acids occur adjacent to asparagine or glutamine. See, Bischoff & Kolbe (1994) J. Chromatog. 662:261. In addition, any methionine residues (typically solvent exposed Met) in CDRs may be changed to Lys, Leu, Ala, or Phe or other amino acids in order to reduce the possibility that the methionine sulfur would oxidize, which could reduce antigen binding affinity and also contribute to molecular heterogeneity in the final antibody preparation. Id. Additionally, in order to prevent or minimize potential scissile Asn-Pro peptide bonds, it may be desirable to alter any Asn-Pro combinations found in a CDR to Gln-Pro, Ala-Pro, or Asn-Ala. Antibodies with such substitutions are subsequently screened to ensure that the substitutions do not decrease the affinity or specificity of the antibody for LAP, or other desired biological activity to unacceptable levels.

### Antibody Engineering of the Fc Region

[0611] The antibodies (e.g., humanized antibodies) and antigen binding fragments thereof disclosed herein (e.g., antibody 20E6 and humanized affinity matured versions thereof) can also be engineered to include modifications within the Fc region, typically to alter one or more properties of the antibody, such as serum half-life, complement fixation, Fc receptor binding, and/or effector function (e.g., antigen-dependent cellular cytotoxicity). Furthermore, the antibodies and antigen binding fragments thereof disclosed herein (e.g., antibody 20E6 and humanized affinity matured versions thereof) can be chemically modified (e.g., one or more chemical moieties can be attached to the antibody) or be modified to alter its glycosylation, again to alter one or more properties of the antibody or antigen binding fragment thereof. Each of these embodiments is described in further detail below. The numbering of residues in the Fc region is that of the EU index of Kabat.

[0612] The antibodies and antigen binding fragments thereof disclosed herein (e.g., antibody 20E6 and humanized affinity matured versions thereof) also include antibodies and antigen binding fragments thereof with modified (or blocked) Fc regions to provide altered effector functions. See, e.g., U.S. Pat. No. 5,624,821; and PCT Publication numbers WO2003/086310; WO2005/120571; WO2006/0057702. Such modifications can be used to enhance or suppress various reactions of the immune system, with possible beneficial effects in diagnosis and therapy. Alterations of the Fc region include amino acid changes (substitutions, deletions and insertions), glycosylation or deglycosylation, and adding multiple Fc regions. Changes to the Fc can also alter the half-life of antibodies in therapeutic antibodies, enabling less frequent dosing and thus increased convenience and decreased use of material. See Presta (2005) J. Allergy Clin. Immunol. 116:731 at 734-35.

[0613] In one embodiment, the antibody or antigen binding fragment thereof of the invention (e.g., antibody 20E6 and humanized affinity matured versions thereof) is an IgG4 isotype antibody or antigen binding fragment thereof comprising a Serine to Proline mutation at a position corresponding to position 228 (S228P; EU index) in the hinge region of the heavy chain constant region. This mutation has been reported to abolish the heterogeneity of inter-heavy chain disulfide bridges in the hinge region (Angal et al. supra; position 241 is based on the Kabat numbering system).

[0614] In one embodiment of the invention, the hinge region of CH1 is modified such that the number of cysteine residues in the hinge region is increased or decreased. This approach is described further in U.S. Pat. No. 5,677,425. The number of cysteine residues in the hinge region of CH1 is altered, for example, to facilitate assembly of the light and heavy chains or to increase or decrease the stability of the antibody.

[0615] In another embodiment, the Fc hinge region of an antibody or antigen binding fragment thereof of the invention (e.g., antibody 20E6 and humanized affinity matured versions thereof) is mutated to decrease the biological half-life of the antibody or antigen binding fragment thereof. More specifically, one or more amino acid mutations are introduced into the CH2-CH3 domain interface region of the Fc-hinge fragment such that the antibody or antigen binding fragment thereof has impaired Staphylococcyl protein A (SpA) binding relative to native Fc-hinge domain SpA binding. This approach is described in further detail in U.S. Pat. No. 6,165,745.

[0616] In another embodiment, the antibody or antigen binding fragment thereof of the invention (e.g., antibody 20E6 and humanized affinity matured versions thereof) is modified to increase its biological half-life. Various approaches are possible. For example, one or more of the following mutations can be introduced: T252L, T254S, T256F, as described in U.S. Pat. No. 6,277,375. Alternatively, to increase the biological half-life, the antibody can be altered within the CH1 or CL region to contain a salvage receptor binding epitope taken from two loops of a CH2 domain of an Fc region of an IgG, as described in U.S. Pat. Nos. 5,869,046 and 6,121,022.

[0617] In yet other embodiments, the Fc region is altered by replacing at least one amino acid residue with a different amino acid residue to alter the effector function(s) of the antibody or antigen binding fragment thereof. For example, one or more amino acids selected from amino acid residues 234, 235, 236, 237, 297, 318, 320 and 322 can be replaced with a different amino acid residue such that the antibody has an altered affinity for an effector ligand and retains the antigen binding ability of the parent antibody. The effector ligand to which affinity is altered can be, for example, an Fc receptor or the C1 component of complement. This approach is described in further detail in U.S. Pat. Nos. 5,624,821 and 5,648,260.

[0618] In another example, one or more amino acids selected from amino acid residues 329, 331 and 322 can be replaced with a different amino acid residue such that the antibody has altered C1q binding and/or reduced or abolished complement dependent cytotoxicity (CDC). This approach is described in further detail in U.S. Pat. No. 6,194,551.

[0619] In another example, one or more amino acid residues within amino acid positions 231 and 239 are altered to thereby alter the ability of the antibody to fix complement. This approach is described further in PCT Publication number WO 94/29351.

[0620] In yet another example, the Fc region is modified to decrease the ability of the antibody or antigen binding fragment thereof of the invention (e.g., antibody 20E6 and humanized affinity matured versions thereof) to mediate antibody dependent cellular cytotoxicity (ADCC) and/or to decrease the affinity of the antibody or antigen binding fragment thereof for an Fc7 receptor by modifying one or more amino acids at the following positions: 238, 239, 243, 248, 249, 252, 254, 255, 256, 258, 264, 265, 267, 268, 269, 270, 272, 276, 278, 280, 283, 285, 286, 289, 290, 292, 293, 294, 295, 296, 298, 301, 303, 305, 307, 309, 312, 315, 320, 322, 324, 326, 327, 329, 330, 331, 333, 334, 335, 337, 338, 340, 360, 373, 376, 378, 382, 388, 389, 398, 414, 416, 419, 430, 434, 435, 437, 438 or 439. This approach is described further in PCT Publication number WO 00/42072. Moreover, the binding sites on human IgG1 for FcγR1, FcγRII, FcγRIII and FcRn have been mapped and variants with improved binding have been described (see Shields et al. (2001) J. Biol. Chem. 276:6591-6604).

[0621] In one embodiment of the invention, the Fc region is modified to decrease the ability of the antibody of the invention (e.g., antibody 20E6 and humanized affinity matured versions thereof) to mediate effector function and/or to increase anti-inflammatory properties by modifying residues 243 and 264. In one embodiment, the Fc region of the antibody or antigen binding fragment thereof is modified by changing the residues at positions 243 and 264 to alanine. In one embodiment, the Fc region is modified to decrease the ability of the antibody or antigen binding fragment thereof to mediate effector function and/or to increase anti-inflammatory properties by modifying residues 243, 264, 267 and 328.

### Altered Effector Function

[0622] In some embodiments, the Fc region of an anti-LAP antibody is modified to increase or reduce the ability of the antibody or antigen binding fragment thereof to mediate effector function and/or to increase/decrease their binding to the Fc gamma receptors (FcγRs).

[0623] The interaction between the constant region of an antigen binding protein and various Fc receptors (FcR) including FcgammaRI (CD64), FcgammaRII (CD32) and FcgammaRIII (CD16) is believed to mediate the effector functions, such as ADCC and CDC, of the antigen binding protein. The Fc receptor is also important for antibody cross-linking, which can be important for anti-tumor immunity.

[0624] Effector function can be measured in a number of ways including for example via binding of the FcgammaRIII to Natural Killer cells or via FcgammaRI to monocytes/macrophages to measure for ADCC effector function. For example, an antigen binding protein of the present invention can be assessed for ADCC effector function in a Natural Killer cell assay. Examples of such assays can be found in Shields et al., 2001 J. Biol. Chem., Vol. 276, p 6591-6604; Chappel et al., 1993 J. Biol. Chem., Vol 268, p 25124-25131; Lazar et al., 2006 PNAS, 103; 4005-4010.

[0625] Human IgG1 constant regions containing specific mutations or altered glycosylation on residue Asn297 have been shown to reduce binding to Fc receptors. In other cases, mutations have also been shown to enhance ADCC and CDC (Lazar et al. PNAS 2006, 103; 4005-4010; Shields et al. J Biol Chem 2001, 276; 6591-6604; Nechansky et al. Mol Immunol, 2007, 44; 1815-1817).

[0626] In one embodiment of the present invention, such mutations are in one or more of positions selected from 239, 332 and 330 (IgG1), or the equivalent positions in other IgG isotypes. Examples of suitable mutations are S239D and 1332E and A330L. In one embodiment, the antigen binding protein of the invention herein described is mutated at positions 239 and 332, for example S239D and 1332E or in a further embodiment it is mutated at three or more positions selected from 239 and 332 and 330, for example S239D and 1332E and A330L. (EU index numbering).

[0627] In an alternative embodiment of the present invention, there is provided an antibody comprising a heavy chain constant region with an altered glycosylation profile such that the antigen binding protein has enhanced effector function. For example, wherein the antibody has enhanced ADCC or enhanced CDC or wherein it has both enhanced ADCC and CDC effector function. Examples of suitable methodologies to produce antigen binding proteins with an altered glycosylation profile are described in PCT Publication numbers WO2003011878 and WO2006014679 and European patent number EP1229125.

[0628] In a further aspect, the present invention provides “non-fucosylated” or “afucosylated” antibodies. Non-fucosylated antibodies harbor a tri-mannosyl core structure of complex-type N-glycans of Fc without fucose residue. These glycoengineered antibodies that lack core fucose residue from the Fc N-glycans may exhibit stronger ADCC than fucosylated equivalents due to enhancement of FcgammaRIIIa binding capacity.

[0629] The present invention also provides a method for the production of an antibody according to the invention comprising the steps of: a) culturing a recombinant host cell comprising an expression vector comprising the isolated nucleic acid as described herein, wherein the recombinant host cell does not comprise an alpha-1,6-fucosyltransferase; and b) recovering the antigen binding protein (e.g., antibody or antigen binding fragment thereof). The recombinant host cell may not normally contain a gene encoding an alpha-1,6-fucosyltransferase (for example yeast host cells such as Pichia sp.) or may have been genetically modified to inactivate an alpha-1,6-fucosyltransferase. Recombinant host cells which have been genetically modified to inactivate the FUT8 gene encoding an alpha-1,6-fucosyltransferase are available. See, e.g., the POTELLIGENT™ technology system available from BioWa, Inc. (Princeton, N.J.) in which CHOK1SV cells lacking a functional copy of the FUT8 gene produce monoclonal antibodies having enhanced antibody dependent cell mediated cytotoxicity (ADCC) activity that is increased relative to an identical monoclonal antibody produced in a cell with a functional FUT8 gene. Aspects of the POTELLIGENT™ technology system are described in U.S. Pat. Nos. U.S. Pat. Nos. 7,214,775 and 6,946,292, and PCT Publication numbers WO0061739 and WO0231240. Those of ordinary skill in the art will also recognize other appropriate systems.

[0630] It will be apparent to those skilled in the art that such modifications may not only be used alone but may be used in combination with each other in order to further enhance or decrease effector function.

Production of Antibodies with Modified Glycosylation

[0631] In still another embodiment, the antibodies or antigen binding fragments thereof of the invention (e.g., antibody and antigen binding fragments in Tables 4, 6, 8, 11-43, and 45 and variants thereof) comprise a particular glycosylation pattern. For example, an afucosylated or an aglycosylated antibody or antigen binding fragment thereof can be made (i.e., the antibody lacks fucose or glycosylation, respectively). The glycosylation pattern of an antibody or antigen binding fragment thereof may be altered to, for example, increase the affinity or avidity of the antibody or fragment for a LAP antigen. Such modifications can be accomplished by, for example, altering one or more of the glycosylation sites within the antibody or antigen binding fragment thereof sequence. For example, one or more amino acid substitutions can be made that result in removal of one or more of the variable region framework glycosylation sites to thereby eliminate glycosylation at that site. Such aglycosylation may increase the affinity or avidity of the antibody or antigen binding fragment thereof for antigen. See, e.g., U.S. Pat. Nos. 5,714,350 and 6,350,861.

[0632] Antibodies and antigen binding antigen binding fragments thereof disclosed herein may further include those produced in lower eukaryote host cells, in particular fungal host cells such as yeast and filamentous fungi have been genetically engineered to produce glycoproteins that have mammalian- or human-like glycosylation patterns (See for example, Choi et al, (2003) Proc. Natl. Acad. Sci. 100: 5022-5027; Hamilton et al., (2003) Science 301: 1244-1246; Hamilton et al., (2006) Science 313: 1441-1443; Nett et al., Yeast 28(3):237-52 (2011); Hamilton et al., Curr Opin Biotechnol. Oct;18(5):387-92 (2007)). A particular advantage of these genetically modified host cells over currently used mammalian cell lines is the ability to control the glycosylation profile of glycoproteins that are produced in the cells such that compositions of glycoproteins can be produced wherein a particular N-glycan structure predominates (see, e.g., U.S. Pat. Nos. 7,029,872 and 7,449,308). These genetically modified host cells have been used to produce antibodies that have predominantly particular N-glycan structures (See for example, Li et al., (2006) Nat. Biotechnol. 24: 210-215).

[0633] In particular embodiments, the antibodies and antigen binding fragments thereof disclosed herein (e.g., antibody and antigen binding fragments in Tables 4, 6, 8, and 11-43 and variants thereof) further include those produced in lower eukaryotic host cells and which comprise fucosylated and non-fucosylated hybrid and complex N-glycans, including bisected and multiantennary species, including but not limited to N-glycans such as GlcNAc₍₁₋₄₎Man₃GlcNAc₂; Gal₍₁₋₄₎GlcNAc₍₁₋₄₎Man₃GlcNAc₂; NANA₍₁₋₄₎Gal₍₁₋₄₎GlcNAc₍₁₋₄₎Man₃GlcNAc₂.

[0634] In particular embodiments, the antibodies and antigen binding fragments thereof provided herein may comprise antibodies or antigen binding fragments thereof having at least one hybrid N-glycan selected from the group consisting of GlcNAcMan₅GlcNAc₂; GalGlcNAcMan₅GlcNAc₂; and NANAGalGlcNAcMan₅GlcNAc₂. In particular aspects, the hybrid N-glycan is the predominant N-glycan species in the composition.

[0635] In particular embodiments, the antibodies and antigen binding fragments thereof provided herein comprise antibodies and antigen binding fragments thereof having at least one complex N-glycan selected from the group consisting of GlcNAcMan₃GlcNAc₂; GalGlcNAcMan₃GlcNAc₂; NANAGalGlcNAcMan₃GlcNAc₂; GlcNAc₂Man₃GlcNAc₂; GalGlcNAc₂Man₃GlcNAc₂; Gal₂GlcNAc₂Man₃GlcNAc₂; NANAGal₂GlcNAc₂Man₃GlcNAc₂; and NANA₂Gal₂GlcNAc₂Man₃GlcNAc₂. In particular aspects, the complex N-glycan are the predominant N-glycan species in the composition. In further aspects, the complex N-glycan is a particular N-glycan species that comprises about 30%, 40%, 50%, 60%, 70%, 80%, 90%, 95%, 97%, 98%, 99%, or 100% of the complex N-glycans in the composition. In one embodiment, the antibody and antigen binding fragments thereof provided herein comprise complex N-glycans, wherein at least 50%, 60%, 70%, 80%, 90%, 95%, 97%, 98%, 99%, or 100% of the complex N-glycans comprise the structure NANA₂Gal₂GlcNAc₂Man₃GlcNAc₂, wherein such structure is afucosylated. Such structures can be produced, e.g., in engineered Pichia pastoris host cells and CHO cells.

[0636] In particular embodiments, the N-glycan is fucosylated. In general, the fucose is in an α1,3-linkage with the GlcNAc at the reducing end of the N-glycan, an α1,6-linkage with the GlcNAc at the reducing end of the N-glycan, an α1,2-linkage with the Gal at the non-reducing end of the N-glycan, an α1,3-linkage with the GlcNac at the non-reducing end of the N-glycan, or an α1,4-linkage with a GlcNAc at the non-reducing end of the N-glycan. Therefore, in particular aspects of the above the glycoprotein compositions, the glycoform is in an α1,3-linkage or α1,6-linkage fucose to produce a glycoform selected from the group consisting of Man₅GlcNAc₂(Fuc), GlcNAcMan₅GlcNAc₂(Fuc), Man₃GlcNAc₂(Fuc), GlcNAcMan₃GlcNAc₂(Fuc), GlcNAc₂Man₃GlcNAc₂(Fuc), GalGlcNAc₂Man₃GlcNAc₂(Fuc), Gal₂GlcNAc₂Man₃GlcNAc₂(Fuc), NANAGal₂GlcNAc₂Man₃GlcNAc₂(Fuc), and NANA₂Gal₂GlcNAc₂Man₃GlcNAc₂(Fuc); in an α1,3-linkage or α1,4-linkage fucose to produce a glycoform selected from the group consisting of GlcNAc(Fuc)Man₅GlcNAc₂, GlcNAc(Fuc)Man₃GlcNAc₂, GlcNAc₂(Fuc₁₋₂)Man₃GlcNAc₂, GalGlcNAc₂(Fuc₁₋₂)Man₃GlcNAc₂, Gal₂GlcNAc₂(Fuc₁₋₂)Man₃GlcNAc₂, NANAGal₂GlcNAc₂(Fuc₁₋₂)Man₃GlcNAc₂, and NANA₂Gal₂GlcNAc₂(Fuc₁₋₂)Man₃GlcNAc₂; or in an α1,2-linkage fucose to produce a glycoform selected from the group consisting of Gal(Fuc)GlcNAc₂Man₃GlcNAc₂, Gal₂(Fuc₁₋₂)GlcNAc₂Man₃GlcNAc₂, NANAGal₂(Fuc₁₋₂)GlcNAc₂Man₃GlcNAc₂, and NANA₂Gal₂(Fuc₁₋₂)GlcNAc₂Man₃GlcNAc₂.

[0637] In further aspects, the antibodies (e.g., humanized antibodies) or antigen binding fragments thereof comprise high mannose N-glycans, including but not limited to, Man₈GlcNAc₂, Man₇GlcNAc₂, Man₆GlcNAc₂, Man₅GlcNAc₂, Man₄GlcNAc₂, or N-glycans that consist of the Man₃GlcNAc₂ N-glycan structure.

[0638] In further aspects of the above, the complex N-glycans further include fucosylated and non-fucosylated bisected and multiantennary species.

[0639] As used herein, the terms “N-glycan” and “glycoform” are used interchangeably and refer to an N-linked oligosaccharide, for example, one that is attached by an asparagine-N-acetylglucosamine linkage to an asparagine residue of a polypeptide. N-linked glycoproteins contain an N-acetylglucosamine residue linked to the amide nitrogen of an asparagine residue in the protein. The predominant sugars found on glycoproteins are glucose, galactose, mannose, fucose, N-acetylgalactosamine (GalNAc), N-acetylglucosamine (GlcNAc) and sialic acid (e.g., N-acetyl-neuraminic acid (NANA)). The processing of the sugar groups occurs co-translationally in the lumen of the ER and continues post-translationally in the Golgi apparatus for N-linked glycoproteins. N-glycans have a common pentasaccharide core of Man₃GlcNAc₂ (“Man” refers to mannose; “Glc” refers to glucose; and “NAc” refers to N-acetyl; GlcNAc refers to N-acetylglucosamine). Usually, N-glycan structures are presented with the non-reducing end to the left and the reducing end to the right. The reducing end of the N-glycan is the end that is attached to the Asn residue comprising the glycosylation site on the protein. N-glycans differ with respect to the number of branches (antennae) comprising peripheral sugars (e.g., GlcNAc, galactose, fucose and sialic acid) that are added to the Man₃GlcNAc₂ (“Man₃”) core structure which is also referred to as the “trimannose core”, the “pentasaccharide core” or the “paucimannose core”. N-glycans are classified according to their branched constituents (e.g., high mannose, complex or hybrid). A “high mannose” type N-glycan has five or more mannose residues. A “complex” type N-glycan typically has at least one GlcNAc attached to the 1,3 mannose arm and at least one GlcNAc attached to the 1,6 mannose arm of a “trimannose” core. Complex N-glycans may also have galactose (“Gal”) or N-acetylgalactosamine (“GalNAc”) residues that are optionally modified with sialic acid or derivatives (e.g., “NANA” or “NeuAc”, where “Neu” refers to neuraminic acid and “Ac” refers to acetyl). Complex N-glycans may also have intrachain substitutions comprising “bisecting” GlcNAc and core fucose (“Fuc”). Complex N-glycans may also have multiple antennae on the “trimannose core,” often referred to as “multiple antennary glycans.” A “hybrid” N-glycan has at least one GlcNAc on the terminal of the 1,3 mannose arm of the trimannose core and zero or more mannoses on the 1,6 mannose arm of the trimannose core. The various N-glycans are also referred to as “glycoforms”.

[0640] With respect to complex N-glycans, the terms “G-2”, “G-1”, “GO”, “G1”, “G2”, “A1”, and “A2” mean the following. “G-2” refers to an N-glycan structure that can be characterized as Man₃GlcNAc₂; the term “G-1” refers to an N-glycan structure that can be characterized as GlcNAcMan₃GlcNAc₂; the term “GO” refers to an N-glycan structure that can be characterized as GlcNAc₂Man₃GlcNAc₂; the term “G1” refers to an N-glycan structure that can be characterized as GalGlcNAc₂Man₃GlcNAc₂; the term “G2” refers to an N-glycan structure that can be characterized as Gal₂GlcNAc₂Man₃GlcNAc₂; the term “A1” refers to an N-glycan structure that can be characterized as NANAGal₂GlcNAc₂Man₃GlcNAc₂; and, the term “A2” refers to an N-glycan structure that can be characterized as NANA₂Gal₂GlcNAc₂Man₃GlcNAc₂. Unless otherwise indicated, the terms G-2”, “G-1”, “GO”, “G1”, “G2”, “A1”, and “A2” refer to N-glycan species that lack fucose attached to the GlcNAc residue at the reducing end of the N-glycan. When the term includes an “F”, the “F” indicates that the N-glycan species contains a fucose residue on the GlcNAc residue at the reducing end of the N-glycan. For example, G0F, G1F, G2F, A1F, and A2F all indicate that the N-glycan further includes a fucose residue attached to the GlcNAc residue at the reducing end of the N-glycan. Lower eukaryotes such as yeast and filamentous fungi do not normally produce N-glycans that produce fucose.

[0641] With respect to multiantennary N-glycans, the term “multiantennary N-glycan” refers to N-glycans that further comprise a GlcNAc residue on the mannose residue comprising the non-reducing end of the 1,6 arm or the 1,3 arm of the N-glycan or a GlcNAc residue on each of the mannose residues comprising the non-reducing end of the 1,6 arm and the 1,3 arm of the N-glycan. Thus, multiantennary N-glycans can be characterized by the formulas GlcNAc₍₂₋₄₎Man₃GlcNAc₂, Gal₍₁₋₄₎GlcNAc₍₂₋₄₎Man₃GlcNAc₂, or NANA₍₁₋₄₎Gal₍₁₋₄₎GlcNAc₍₂₋₄₎Man₃GlcNAc₂. The term “1-4” refers to 1, 2, 3, or 4 residues. With respect to bisected N-glycans, the term “bisected N-glycan” refers to N-glycans in which a GlcNAc residue is linked to the mannose residue at the reducing end of the N-glycan. A bisected N-glycan can be characterized by the formula GlcNAc₃Man₃GlcNAc₂ wherein each mannose residue is linked at its non-reducing end to a GlcNAc residue. In contrast, when a multiantennary N-glycan is characterized as GlcNAc₃Man₃GlcNAc₂, the formula indicates that two GlcNAc residues are linked to the mannose residue at the non-reducing end of one of the two arms of the N-glycans and one GlcNAc residue is linked to the mannose residue at the non-reducing end of the other arm of the N-glycan.

### Antibody Physical Properties

[0642] The antibodies and antigen binding fragments thereof disclosed herein (e.g., antibody and antigen binding fragments in Tables 4, 6, 8, 11-43, 45 and variants thereof) may further contain one or more glycosylation sites in either the light or heavy chain immunoglobulin variable region. Such glycosylation sites may result in increased immunogenicity of the antibody or antigen binding fragment thereof or an alteration of the PK of the antibody due to altered antigen binding (Marshall et al. (1972) Annu Rev Biochem 41:673-702; Gala and Morrison (2004) J Immunol 172:5489-94; Wallick et al (1988) J Exp Med 168:1099-109; Spiro (2002) Glycobiology 12:43R-56R; Parekh et al (1985) Nature 316:452-7; Mimura et al. (2000) Mol Immunol 37:697-706). Glycosylation has been known to occur at motifs containing an N—X-S/T sequence.

[0643] Each antibody or antigen binding fragment thereof will have a characteristic melting temperature, with a higher melting temperature indicating greater overall stability in vivo (Krishnamurthy R and Manning M C (2002) Curr Pharm Biotechnol 3:361-71). In general, the T_{M1} (the temperature of initial unfolding) may be greater than 60° C., greater than 65° C., or greater than 70° C. The melting point of an antibody or antigen binding fragment thereof can be measured using differential scanning calorimetry (Chen et al (2003) Pharm Res 20:1952-60; Ghirlando et al (1999) Immunol Lett 68:47-52) or circular dichroism (Murray et al. (2002) J. Chromatogr Sci 40:343-9). In a further embodiment, antibodies and antigen binding fragments thereof (e.g., antibody 20E6 and humanized versions thereof) are selected that do not degrade rapidly. Degradation of an antibody or antigen binding fragment thereof can be measured using capillary electrophoresis (CE) and MALDI-MS (Alexander A J and Hughes D E (1995) Anal Chem 67:3626-32).

[0644] In a further embodiment, antibodies and antigen binding fragments thereof are selected that have minimal aggregation effects, which can lead to the triggering of an unwanted immune response and/or altered or unfavorable pharmacokinetic properties. Generally, antibodies and antigen binding fragments thereof are acceptable with aggregation of 25% or less, 20% or less, 15% or less, 10% or less, or 5% or less. Aggregation can be measured by several techniques, including size-exclusion column (SEC), high performance liquid chromatography (HPLC), and light scattering.

### V. Multispecific Antibodies

[0645] Multispecific antibodies (e.g., bispecific antibodies) provided herein include at least one binding region for a particular epitope on LAP-TGFβ1 (e.g., human LAP-TGFβ1) as described herein, and at least one other binding region (e.g., a cancer antigen). Multispecific antibodies can be prepared as full-length antibodies or antigen binding fragments thereof (e.g. F(ab′)₂ antibodies).

[0646] Methods for making multispecific antibodies are well known in the art (see, e.g., PCT Publication numbers WO 05117973 and WO 06091209). For example, production of full length multispecific antibodies can be based on the co-expression of two paired immunoglobulin heavy chain-light chains, where the two chains have different specificities. Various techniques for making and isolating multispecific antibody fragments directly from recombinant cell culture have also been described. For example, multispecific antibodies can be produced using leucine zippers. Another strategy for making multispecific antibody fragments by the use of single-chain Fv (scFv) dimers has also been reported.

[0647] Examples of suitable multispecific molecule platforms include, but are not limited to, Dual Targeting (DT)-Ig (GSK/Domantis), Two-in-one Antibody (Genentech), Cross-linked Mabs (Karmanos Cancer Center), Fcab and mAb² (F-Star), CovX-body (CovX/Pfizer), Dual Variable Domain (DVD)-Ig (Abbott), IgG-like Bispecific (ImClone/Eli Lilly), Ts2Ab (Medlmmune/AZ) and BsAb (Zymogenetics), HERCULES (Biogen Idec), TvAb (Roche), ScFv/Fc Fusions, SCORPION (Emergent BioSolutions/Trubion, Zymogenetics/BMS), Dual Affinity Retargeting Technology (Fc-DART) (MacroGenics), Dual(ScFv)2-Fab (National Research Center for Antibody Medicine—China), F(ab)2 (Medarex/AMGEN), Dual-Action or Bis-Fab (Genentech), Dock-and-Lock (DNL) (ImmunoMedics), Bivalent Bispecific (Biotecnol), SEED (EMD Serono), mAb² (F-star), Fab-Fv (UCB-Celltech), Bispecific T Cell Engager (BiTE) (Micromet, Tandem Diabody (Tandab) (Affimed), Dual Affinity Retargeting Technology (DART) (MacroGenics), Single-chain Diabody (Academic), TCR-like Antibodies (AIT, ReceptorLogics), COMBODY (Epigen Biotech), dual targeting nanobodies (Ablynx), and Fc-engineered IgG1 (Xencor).

[0648] In a particular embodiment, the multispecific antibody comprises a first antibody (or binding portion thereof) which binds to LAP-TGFβ1 derivatized or linked to another functional molecule, e.g., another peptide or protein (e.g., another antibody or ligand for a receptor) to generate a multispecific molecule that binds to LAP-TGFβ1 and a non-LAP target molecule. An antibody or antigen binding fragment thereof may be derivatized or linked to more than one other functional molecule to generate multispecific molecules that bind to more than two different binding sites and/or target molecules. To create a multispecific molecule, an antibody or antigen binding fragment thereof disclosed herein can be functionally linked (e.g., by chemical coupling, genetic fusion, noncovalent association or otherwise) to one or more other binding molecules, such as another antibody or antigen binding fragment thereof, antibody fragment, peptide, receptor, or binding mimetic, such that a multispecific molecule results.

[0649] Accordingly, multispecific molecules, for example, bispecific antibodies and bifunctional antibodies, comprising at least one first binding specificity for a particular epitope on LAP-TGFβ1 (e.g., human LAP-TGFβ1) and a second binding specificity for a second target are contemplated. In some embodiments, the second target is the second binding region specifically binds to a tumor-associated antigen. Tumor-associated antigens are well known in the art. Exemplary tumor-associated antigens include, but are not limited to, AFP, ALK, BAGE proteins, β-catenin, brc-abl, BRCA1, BORIS, CA9, carbonic anhydrase IX, caspase-8, CCR5, CD19, CD20, CD30, CDK4, CEA, cyclin-B1, CYP1B1, EGFR, EGFRvIII, ErbB2/Her2, ErbB3, ErbB4, ETV6-AML, EpCAM, EphA2, Fra-1, FOLR1, GAGE proteins (e.g., GAGE-1, -2), GD2, GD3, GloboH, glypican-3, GM3, gp100, Her2, HLA/B-raf, HLA/k-ras, HLA/MAGE-A3, hTERT, LMP2, MAGE proteins (e.g., MAGE-1, -2, -3, -4, -6, and -12), MART-1, mesothelin, ML-IAP, Mucd, Muc2, Muc3, Muc4, Muc5, Muc16 (CA-125), MUM1, NA17, NY-BR1, NY-BR62, NY-BR85, NY-ESO1, OX40, p15, p53, PAP, PAX3, PAX5, PCTA-1, PLAC1, PRLR, PRAME, PSMA (FOLH1), RAGE proteins, Ras, RGS5, Rho, SART-1, SART-3, Steap-1, Steap-2, STn, survivin, TAG-72, TGF-β, TMPRSS2, Tn, TRP-1, TRP-2, tyrosinase, and uroplakin-3.

[0650] In some embodiments, the second binding region of the bispecific antibody specifically binds to CD4, CD8, CD45, CD56, CD14, CD16, CD19, CD20, CD25, CD38, CD11b, CD22, CD30, CD39, CD 114, CD23, CD73, CD163, CD206, CD203, CD200R, PD-1, PD-L1, PD-L2, CTLA-4, IDO, TIM-3, LAG-3, TIGIT, PVR, PVRL2, B7H3, B7H4, CSF-1R, VISTA, KIR, OX-40, GITR, 4-1BB, CD40, CD40L, CD27/CD70, CD28, ICOS, CD3, CD56, NKG2DA, NKG2DB, NKG2DC, NKG2DD, NKG2DF, NKG2DH, CD94, NKP46, NKP30, CD33, CD73, CD47, LILRB1, CD91, calreticulin, CD122, GARP, LRRC33, LAP2, LAP3, TGFβ1, TGFβ2, TGFβ3, FAP, cadherin 11 and stanniocalcin 1. In some embodiments, the second binding region has agonistic properties when binding to a target, e.g., a TNF family member agonist, OX40 ligand, CD137 ligand, CD137 agonist, STING agonist, GITR agonist, ICOS agonist, and CD28 agonist.

[0651] In some embodiments, the antibody is a trispecific antibody comprising a first, second, and third binding region, wherein the first binding region comprises the binding specificity (e.g., antigen binding region) of an anti-LAP antibody described herein, and the second and third binding regions bind to two different targets (or different epitopes on the same target), for example, the targets described above.

[0652] In some embodiments, the antibody is a bifunctional antibody comprising an anti-LAP antibody described herein and a receptor molecule (i.e., a receptor trap construct such as a TGFβ superfamily ligand receptor (e.g., ActRIIB and variants thereof) or VEGFR).

[0653] In one embodiment, the multispecific molecules comprise as a binding specificity at least one antibody, or an antibody fragment thereof, including, e.g., a Fab, Fab′, F(ab′)₂, Fv, or a single chain Fv. The antibody may also be a light chain or heavy chain dimer, or any minimal fragment thereof such as a Fv or a single chain construct as described in Ladner et al. U.S. Pat. No. 4,946,778.

[0654] The multispecific molecules can be prepared by conjugating the constituent binding specificities, e.g., the anti-FcR and anti-LAP binding specificities, using methods known in the art. For example, each binding specificity of the multispecific molecule can be generated separately and then conjugated to one another. When the binding specificities are proteins or peptides, a variety of coupling or cross-linking agents can be used for covalent conjugation. Examples of cross-linking agents include protein A, carbodiimide, N-succinimidyl-S-acetyl-thioacetate (SATA), 5,5′-dithiobis(2-nitrobenzoic acid) (DTNB), o-phenylenedimaleimide (oPDM), N-succinimidyl-3-(2-pyridyldithio)propionate (SPDP), and sulfosuccinimidyl 4-(N-maleimidomethyl) cyclohaxane-1-carboxylate (sulfo-SMCC). Preferred conjugating agents are SATA and sulfo-SMCC, both available from Pierce Chemical Co. (Rockford, Ill.).

[0655] When the binding specificities are antibodies, they can be conjugated via sulfhydryl bonding of the C-terminus hinge regions of the two heavy chains. In a particularly preferred embodiment, the hinge region is modified to contain an odd number of sulfhydryl residues, preferably one, prior to conjugation.

[0656] Alternatively, both binding specificities can be encoded in the same vector and expressed and assembled in the same host cell. This method is particularly useful where the multispecific molecule is a mAb×mAb, mAb×Fab, Fab×F(ab′)₂ or ligand×Fab fusion protein. A multispecific molecule can be a single chain molecule comprising one single chain antibody and a binding determinant, or a single chain bispecific molecule comprising two binding determinants. Multispecific molecules may comprise at least two single chain molecules. Methods for preparing multispecific molecules are described for example in U.S. Pat. Nos. 5,260,203; 5,455,030; 4,881,175; 5,132,405; 5,091,513; 5,476,786; 5,013,653; 5,258,498; and 5,482,858.

[0657] Binding of the multispecific molecules to their specific targets can be confirmed by, for example, enzyme-linked immunosorbent assay (ELISA), radioimmunoassay (RIA), fluorescence-activated cell sorting (FACS) analysis, bioassay (e.g., growth inhibition), or western blot assay. Each of these assays generally detects the presence of protein-antibody complexes of particular interest by employing a labeled reagent (e.g., an antibody) specific for the complex of interest. For example, the FcR-antibody complexes can be detected using e.g., an enzyme-linked antibody or antibody fragment which recognizes and specifically binds to the antibody-FcR complexes. Alternatively, the complexes can be detected using any of a variety of other immunoassays. For example, the antibody can be radioactively labeled and used in a radioimmunoassay (RIA). The radioactive isotope can be detected by such means as the use of a α γ-β counter or a scintillation counter or by autoradiography.

### VI. Immunoconjugates

[0658] Immunoconjugates comprising the anti-LAP antibodies or antigen binding fragments thereof described herein can be formed by conjugating the antibodies to another therapeutic agent to form, e.g., an antibody-drug conjugate (ADC). Suitable agents include, for example, a cytotoxic agent (e.g., a chemotherapeutic agent), a toxin (e.g. an enzymatically active toxin of bacterial, fungal, plant or animal origin, or fragments thereof), and/or a radioactive isotope (i.e., a radioconjugate). Additional suitable agents include, e.g., antimetabolites, alkylating agents, DNA minor groove binders, DNA intercalators, DNA crosslinkers, histone deacetylase inhibitors, nuclear export inhibitors, proteasome inhibitors, topoisomerase I or II inhibitors, heat shock protein inhibitors, tyrosine kinase inhibitors, antibiotics, and anti-mitotic agents. In some embodiments, ADCs with the anti-LAP antibodies or antigen binding fragment thereof described herein (e.g., conjugated to a cytotoxic agent) that bind to immunosuppressive cells (e.g., regulatory T cells) can be used to deplete the immunosuppressive cells from, e.g., the tumor microenvironment.

[0659] Enzymatically active toxins and fragments thereof which can be used include diphtheria A chain, nonbinding active fragments of diphtheria toxin, exotoxin A chain (from Pseudomonas aeruginosa), ricin A chain, abrin A chain, modeccin A chain, alpha-sarcin, Aleurites fordii proteins, dianthin proteins, Phytolaca americana proteins (PAPI, PAPII, and PAP-S), Momordica charantia inhibitor, curcin, crotin, Sapaonaria officinalis inhibitor, gelonin, mitogellin, restrictocin, phenomycin, neomycin, and the tricothecenes. Additional examples of cytotoxins or cytotoxic agents include, e.g., taxol, cytochalasin B, gramicidin D, ethidium bromide, emetine, mitomycin, etoposide, tenoposide, vincristine, vinblastine, colchicin, doxorubicin, daunorubicin, dihydroxy anthracin dione, mitoxantrone, mithramycin, actinomycin D, 1-dehydrotestosterone, glucocorticoids, procaine, tetracaine, lidocaine, propranolol, and puromycin and analogs or homologs thereof. Therapeutic agents include, but are not limited to, antimetabolites (e.g., methotrexate, 6-mercaptopurine, 6-thioguanine, cytarabine, 5-fluorouracil decarbazine), alkylating agents (e.g., mechlorethamine, thioepa chlorambucil, melphalan, carmustine (BSNU) and lomustine (CCNU), cyclothosphamide, busulfan, dibromomannitol, streptozotocin, mitomycin C, and cis-dichlorodiamine platinum (II) (DDP) cisplatin), anthracyclines (e.g., daunorubicin (formerly daunomycin) and doxorubicin), antibiotics (e.g., dactinomycin (formerly actinomycin), bleomycin, mithramycin, and anthramycin (AMC)), and anti-mitotic agents (e.g., vincristine and vinblastine).

[0660] In the ADC, the antibody and therapeutic agent preferably are conjugated via a cleavable linker such as a peptidyl, disulfide, or hydrazone linker. More preferably, the linker is a peptidyl linker such as Val-Cit, Ala-Val, Val-Ala-Val, Lys-Lys, Pro-Val-Gly-Val-Val (SEQ ID NO: 2649), Ala-Asn-Val, Val-Leu-Lys, Ala-Ala-Asn, Cit-Cit, Val-Lys, Lys, Cit, Ser, or Glu. The ADCs can be prepared as described in U.S. Pat. Nos. 7,087,600; 6,989,452; and 7,129,261; PCT Publication numbers WO 02/096910; WO 07/038658; WO 07/051081; WO 07/059404; WO 08/083312; and WO 08/103693; U.S. Patent Publication numbers 20060024317; 20060004081; and 20060247295; the disclosures of which are incorporated herein by reference.

[0661] A variety of radionuclides are available for the production of radioconjugated anti-LAP antibodies. Examples include ²¹²Bi, ¹³¹I, ¹³¹In ⁹⁰Y and ¹⁸⁶ Re.

[0662] Immunoconjugates can also be used to modify a given biological response, and the drug moiety is not to be construed as limited to classical chemical therapeutic agents. For example, the drug moiety may be a protein or polypeptide possessing a desired biological activity (e.g., lymphokines, tumor necrosis factor, IFNγ, growth factors).

[0663] Immunoconjugates can be made using a variety of bifunctional protein coupling agents such as N-succinimidyl-3-(2-pyridyldithiol) propionate (SPDP), iminothiolane (IT), bifunctional derivatives of imidoesters (such as dimethyl adipimidate HCL), active esters (such as disuccinimidyl suberate), aldehydes (such as glutareldehyde), bis-azido compounds (such as bis (p-azidobenzoyl) hexanediamine), bis-diazonium derivatives (such as bis-(p-diazoniumbenzoyl)-ethylenediamine), diisocyanates (such as tolyene 2,6-diisocyanate), and bis-active fluorine compounds (such as 1,5-difluoro-2,4-dinitrobenzene). Carbon-14-labeled 1-isothiocyanatobenzyl-3-methyldiethylene triaminepentaacetic acid (MX-DTPA) is an exemplary chelating agent for conjugation of radionucleotide to the antibody (see, e.g., PCT publication number WO94/11026).

[0664] Techniques for conjugating such therapeutic moiety to antibodies are well known, see, e.g., Arnon et al., “Monoclonal Antibodies For Immunotargeting Of Drugs In Cancer Therapy”, in Monoclonal Antibodies And Cancer Therapy, Reisfeld et al. (eds.), pp. 243-56 (Alan R. Liss, Inc. 1985); Hellstrom et al., “Antibodies For Drug Delivery”, in Controlled Drug Delivery (2nd Ed.), Robinson et al. (eds.), pp. 623-53 (Marcel Dekker, Inc. 1987); Thorpe, “Antibody Carriers Of Cytotoxic Agents In Cancer Therapy: A Review”, in Monoclonal Antibodies ′84: Biological And Clinical Applications, Pinchera et al. (eds.), pp. 475-506 (1985); “Analysis, Results, And Future Prospective Of The Therapeutic Use Of Radiolabeled Antibody In Cancer Therapy”, in Monoclonal Antibodies For Cancer Detection And Therapy, Baldwin et al. (eds.), pp. 303-16 (Academic Press 1985), and Thorpe et al., “The Preparation And Cytotoxic Properties Of Antibody-Toxin Conjugates”, Immunol. Rev., 62:119-58 (1982).

[0665] The anti-LAP antibodies or antigen binding fragments thereof described herein also are used for diagnostic purposes. Such antibodies or antigen binding fragments thereof can be conjugated to an appropriate detectable agent to form an immunoconjugate. For diagnostic purposes, appropriate agents are detectable labels that include radioisotopes, for whole body imaging, and radioisotopes, enzymes, fluorescent labels and other suitable antibody tags for sample testing.

[0666] The detectable labels can be any of the various types used currently in the field of in vitro diagnostics, including particulate labels, isotopes, chromophores, fluorescent markers, luminescent markers, metal labels (e.g., for CyTOF, imaging mass cytometry), phosphorescent markers and the like, as well as enzyme labels that convert a given substrate to a detectable marker, and polynucleotide tags that are revealed following amplification such as by polymerase chain reaction. Suitable enzyme labels include horseradish peroxidase, alkaline phosphatase and the like. For instance, the label can be the enzyme alkaline phosphatase, detected by measuring the presence or formation of chemiluminescence following conversion of 1,2 dioxetane substrates such as adamantyl methoxy phosphoryloxy phenyl dioxetane (AMPPD), disodium 3-(4-(methoxyspiro{1,2-dioxetane-3,2′-(5′-chloro)tricyclo{3.3.1.1 3,7}decan}-4-yl) phenyl phosphate (CSPD), as well as CDP and CDP-star® or other luminescent substrates well-known to those in the art, for example the chelates of suitable lanthanides such as Terbium(III) and Europium(III). The detection means is determined by the chosen label. Appearance of the label or its reaction products can be achieved using the naked eye, in the case where the label is particulate and accumulates at appropriate levels, or using instruments such as a spectrophotometer, a luminometer, a fluorimeter, and the like, all in accordance with standard practice.

[0667] Preferably, conjugation methods result in linkages which are substantially (or nearly) non-immunogenic, e.g., peptide-(i.e. amide-), sulfide-, (sterically hindered), disulfide-, hydrazone-, and ether linkages. These linkages are nearly non-immunogenic and show reasonable stability within serum (see e.g. Senter, P. D., Curr. Opin. Chem. Biol. 13 (2009) 235-244; and PCT Publication numbers WO 2009/059278 and WO 95/17886).

[0668] Depending on the biochemical nature of the moiety and the antibody, different conjugation strategies can be employed. In case the moiety is naturally occurring or recombinant of between 50 to 500 amino acids, there are standard procedures in text books describing the chemistry for synthesis of protein conjugates, which can be easily followed by the skilled artisan (see e.g. Hackenberger, C. P. R., and Schwarzer, D., Angew. Chem. Int. Ed. Engl. 47 (2008) 10030-10074). In one embodiment the reaction of a maleinimido moiety with a cysteine residue within the antibody or the moiety is used. This is an especially suited coupling chemistry in case e.g. a Fab or Fab′-fragment of an antibody is used. Alternatively, in one embodiment coupling to the C-terminal end of the antibody or moiety is performed. C-terminal modification of a protein, e.g. of a Fab-fragment can e.g. be performed as described (Sunbul, M. and Yin, J., Org. Biomol. Chem. 7 (2009) 3361-3371).

[0669] In general, site specific reaction and covalent coupling is based on transforming a natural amino acid into an amino acid with a reactivity which is orthogonal to the reactivity of the other functional groups present. For example, a specific cysteine within a rare sequence context can be enzymatically converted in an aldehyde (see Frese, M. A., and Dierks, T., ChemBioChem. 10 (2009) 425-427). It is also possible to obtain a desired amino acid modification by utilizing the specific enzymatic reactivity of certain enzymes with a natural amino acid in a given sequence context (see, e.g., Taki, M. et al., Prot. Eng. Des. Sel. 17 (2004) 119-126; Gautier, A. et al. Chem. Biol. 15 (2008) 128-136; and Protease-catalyzed formation of C—N bonds is used by Bordusa, F., Highlights in Bioorganic Chemistry (2004) 389-403). Site specific reaction and covalent coupling can also be achieved by the selective reaction of terminal amino acids with appropriate modifying reagents. The reactivity of an N-terminal cysteine with benzonitrils (see Ren, H. et al., Angew. Chem. Int. Ed. Engl. 48 (2009) 9658-9662) can be used to achieve a site-specific covalent coupling. Native chemical ligation can also rely on C-terminal cysteine residues (Taylor, E. Vogel; Imperiali, B, Nucleic Acids and Molecular Biology (2009), 22 (Protein Engineering), 65-96).

[0670] The moiety may also be a synthetic peptide or peptide mimic. In case a polypeptide is chemically synthesized, amino acids with orthogonal chemical reactivity can be incorporated during such synthesis (see e.g. de Graaf, A. J. et al., Bioconjug. Chem. 20 (2009) 1281-1295). Since a great variety of orthogonal functional groups is at stake and can be introduced into a synthetic peptide, conjugation of such peptide to a linker is standard chemistry.

[0671] In some embodiments, the moiety attached to an anti-LAP antibody or antigen binding fragment thereof is selected from the group consisting of a detectable moiety, binding moiety, a labeling moiety, and a biologically active moiety.

### VII. Assays

[0672] The anti-LAP antibodies or antigen binding fragments thereof disclosed herein can be tested for desired properties, e.g., those described herein, using a variety of assays known in the art.

[0673] In one embodiment, the antibodies or antigen binding fragments thereof are tested for specific binding to LAP-TGFβ1 (e.g., human LAP-TGFβ1). Methods for analyzing binding affinity, cross-reactivity, and binding kinetics of various anti-LAP antibodies or antigen binding fragments thereof include standard assays known in the art, for example, Biacore™ surface plasmon resonance (SPR) analysis using a Biacore™ 2000 SPR instrument (Biacore AB, Uppsala, Sweden) or bio-layer interferometry (e.g., ForteBio assay), as described in the Examples. In some embodiments, the LAP used in the binding assay is complexed with TGFβ1. In some embodiments, the LAP used in the binding assay is not complexed with TGFβ1. In some embodiments, the LAP used in the binding assay is complexed with TGFβ1 and GARP or a fragment of GARP or LRRC33 or a fragment of LRRC33. In some embodiments the LAP used in the binding assay is complexed with TGFβ1 and LTBP (e.g., LTBP1, LTBP3, or LTBP4) or a fragment of LTBP.

[0674] In one embodiment, the antibodies or antigen binding fragments thereof are tested for the ability to bind to cells that have been transfected with LAP-TGFβ1. In some embodiments the cells have also been transfected with GARP or LRRC33.

[0675] In one embodiment, the antibodies or antigen binding fragments thereof are screened for the ability to bind to the surface of beads that have been coated with LAP.

[0676] In one embodiment, the antibodies or antigen binding fragments thereof are screened for the ability to bind to LAP on cells expressing a heparin sulfate glycoprotein such as syndecan-4. For example, heparin sulfate glycoprotein-expressing cells are incubated with LAP or with LAP complexed to LTBP (e.g., LTBP1, LTBP3, or LTBP4) and the antibodies are screened for binding by flow cytometry.

[0677] In one embodiment, the antibodies or antigen binding fragments thereof are tested for the ability to bind or affect TGFβ1. In one embodiment, the antibodies are screened for the ability to bind or affect TGFβ2. In one embodiment, the antibodies are tested for the ability to bind or affect TGFβ3.

[0678] In another embodiment, the antibodies or antigen binding fragments thereof are tested for their effects on TGFβ activation (e.g., inhibition, stimulation, or no effect). In some embodiments, TGFβ1 activation is mediated by the binding of integrins including, but not limited, to αvβ6, αvβ8, αvβ3, or αvβ1. In some embodiments, TGFβ1 activation is mediated by matrix metalloproteases including, but not limited to, MMP2 and MMP9. In some embodiments, TGFβ1 activation is mediated by thrombospondin. In some embodiments, TGFβ1 activation is mediated by serum proteases. In some embodiments, TGFβ1 activation is mediated by heat, by shear forces, by a shift in pH or by ionizing radiation. In some embodiments, TGFβ1 activation is mediated by reactive oxygen species (ROS). The source of LAP in the activation assays can be LAP on the surface of a transfected cell line, LAP on the surface of a cell population that expresses LAP endogenously or in response to specific stimuli, LAP bound to extracellular matrix, LAP in solution (e.g., recombinant LAP), either complexed with TGFβ1 or without TGFβ1 or complexed with TGFβ1 and an anchor protein, such as GARP, LRRC33, LTBP1, LTBP3, or LTBP4. LAP-TGFβ1 can be purchased from R&D Systems or can be isolated from cell supernatants. The effect an antibody has on TGFβ1 activation can be determined, for example, using an ELISA which measures levels of active TGFβ1 under different conditions (e.g., with or without antibody). The effect an antibody has on LAP-TGFβ1 activation can also be determined using a reporter cell line that expresses TGFβ receptor and responds to mature TGFβ.

[0679] In another embodiment, the antibodies or antigen binding fragments thereof are tested for the ability to bind LAP in the extracellular matrix. Suitable methods for determining whether antibodies bind to LAP in the extracellular matrix include in vitro assays, wherein cells (e.g., P3U1 cells transfected with LAP-TGFB) are cultured to lay down ECM on culture plates and subsequently removed, and labeled antibodies are tested for their ability to bind to the LAP and ECM left on the culture plate surface. Similar assays can be run using fibroblast cell lines or other cells that are known to secrete LAP-TGFβ and extracellular matrix components. In some embodiments, whether or not the anti-LAP antibodies bind to or do not bind to ECM can be determined by an ELISA, where the ECM has been shown to express latent TGFβ using commercially available antibodies.

[0680] In another embodiment, the antibodies or antigen binding fragments thereof are tested for their ability to bind to particular cell types, e.g., immune cells (e.g., immunosuppressive cells, leukocytes) or platelets. The binding of antibodies or antigen binding fragments thereof to certain leukocyte populations (e.g., Tregs, macrophages, MDSCs, GARP-negative cells) can be determined using flow cytometry.

[0681] Antibodies or antigen binding fragments thereof can also be tested for their ability to inhibit the proliferation or viability of cells (either in vivo or in vitro), such as tumor cells, using art-recognized methods (e.g., 3H-thymidine incorporation, immunohistochemistry with proliferation markers, animal cancer models).

[0682] Antibodies or antigen binding fragments thereof can also be tested for their anti-tumor activity in vivo (e.g., as monotherapy or combination therapy), using syngeneic tumor models well known in the art, such as the CT26 colorectal tumor model, EMT6 breast cancer model, and 4T1 breast cancer tumor metastasis model. See WO/2016/115345 and WO/2019/075090. Anti-LAP antibodies can also be tested in tumor xenogragft models which are known to be inhibited by anti-TGFβ antibodies (e.g., Detroit 562 tumor xenograft model).

### VIII. Compositions

[0683] Also provided herein are compositions (e.g., pharmaceutical compositions) comprising the anti-LAP antibodies or antigen binding fragments thereof described herein, immunoconjugates comprising the same, or bispecific antibodies comprising the same, and a carrier (e.g., pharmaceutically acceptable carrier). Such compositions are useful for various therapeutic applications.

[0684] In some embodiments, pharmaceutical compositions disclosed herein can include other compounds, drugs, and/or agents used for the treatment of various diseases (e.g., cancer, fibrosis, autoimmune diseases). Such compounds, drugs, and/or agents can include, for example, an anti-cancer agent, a chemotherapeutic agent, an immunosuppressive agent, an immunostimulatory agent, an immune checkpoint inhibitor, and/or an anti-inflammatory agent. Exemplary compounds, drugs, and agents that can be formulated together or separately with the anti-LAP antibodies or antigen binding fragments thereof described herein are described in the next section (i.e., Section IX; Uses and Methods).

[0685] As used herein, “pharmaceutically acceptable carrier” includes any and all solvents, dispersion media, coatings, antibacterial and antifungal agents, isotonic and absorption delaying agents, and the like that are physiologically compatible. Preferably, the carrier is suitable for intravenous, intramuscular, subcutaneous, parenteral, spinal or epidermal administration (e.g., by injection or infusion). Depending on the route of administration, the active compound, i.e., antibody, immunoconjugate, or bispecific molecule, may be coated in a material to protect the compound from the action of acids and other natural conditions that may inactivate the compound.

[0686] The pharmaceutical compounds described herein may include one or more pharmaceutically acceptable salts. A “pharmaceutically acceptable salt” refers to a salt that retains the desired biological activity of the parent compound and does not impart any undesired toxicological effects (see e.g., Berge, S. M., et al. (1977) J. Pharm. Sci. 66:1-19). Examples of such salts include acid addition salts and base addition salts. Acid addition salts include those derived from nontoxic inorganic acids, such as hydrochloric, nitric, phosphoric, sulfuric, hydrobromic, hydroiodic, phosphorous and the like, as well as from nontoxic organic acids such as aliphatic mono- and dicarboxylic acids, phenyl-substituted alkanoic acids, hydroxy alkanoic acids, aromatic acids, aliphatic and aromatic sulfonic acids and the like. Base addition salts include those derived from alkaline earth metals, such as sodium, potassium, magnesium, calcium and the like, as well as from nontoxic organic amines, such as N,N′-dibenzylethylenediamine, N-methylglucamine, chloroprocaine, choline, diethanolamine, ethylenediamine, procaine and the like.

[0687] A pharmaceutical composition described herein may also include a pharmaceutically acceptable anti-oxidant. Examples of pharmaceutically acceptable antioxidants include: (1) water soluble antioxidants, such as ascorbic acid, cysteine hydrochloride, sodium bisulfate, sodium metabisulfite, sodium sulfite and the like; (2) oil-soluble antioxidants, such as ascorbyl palmitate, butylated hydroxyanisole (BHA), butylated hydroxytoluene (BHT), lecithin, propyl gallate, alpha-tocopherol, and the like; and (3) metal chelating agents, such as citric acid, ethylenediamine tetraacetic acid (EDTA), sorbitol, tartaric acid, phosphoric acid, and the like.

[0688] Examples of suitable aqueous and nonaqueous carriers that may be employed in the pharmaceutical compositions described herein include water, ethanol, polyols (such as glycerol, propylene glycol, polyethylene glycol, and the like), and suitable mixtures thereof, vegetable oils, such as olive oil, and injectable organic esters, such as ethyl oleate. These compositions may also contain adjuvants such as preservatives, wetting agents, emulsifying agents and dispersing agents. Prevention of presence of microorganisms may be ensured both by sterilization procedures, supra, and by the inclusion of various antibacterial and antifungal agents, for example, paraben, chlorobutanol, phenol sorbic acid, and the like. It may also be desirable to include isotonic agents, such as sugars, sodium chloride, and the like into the compositions. In addition, prolonged absorption of the injectable pharmaceutical form may be brought about by the inclusion of agents which delay absorption such as aluminum monostearate and gelatin.

[0689] Pharmaceutically acceptable carriers include sterile aqueous solutions or dispersions and sterile powders for the extemporaneous preparation of sterile injectable solutions or dispersion. The use of such media and agents for pharmaceutically active substances is known in the art. Except insofar as any conventional media or agent is incompatible with the active compound, use thereof in the pharmaceutical compositions described herein is contemplated. A pharmaceutical composition may comprise a preservative or may be devoid of a preservative. Supplementary active compounds can be incorporated into the compositions.

[0690] Therapeutic compositions typically must be sterile and stable under the conditions of manufacture and storage. The composition can be formulated as a solution, microemulsion, liposome, or other ordered structure suitable to high drug concentration. The carrier can be a solvent or dispersion medium containing, for example, water, ethanol, polyol (for example, glycerol, propylene glycol, and liquid polyethylene glycol, and the like), and suitable mixtures thereof. The proper fluidity can be maintained, for example, by the use of a coating such as lecithin, by the maintenance of the required particle size in the case of dispersion and by the use of surfactants. In many cases, it will be preferable to include isotonic agents, for example, sugars, polyalcohols such as mannitol, sorbitol, or sodium chloride in the composition. Prolonged absorption of the injectable compositions can be brought about by including in the composition an agent that delays absorption, for example, monostearate salts and gelatin.

[0691] Sterile injectable solutions can be prepared by incorporating the active compound in the required amount in an appropriate solvent with one or a combination of ingredients enumerated above, as required, followed by sterilization microfiltration. Generally, dispersions are prepared by incorporating the active compound into a sterile vehicle that contains a basic dispersion medium and the required other ingredients from those enumerated herein. In the case of sterile powders for the preparation of sterile injectable solutions, the preferred methods of preparation are vacuum drying and freeze-drying (lyophilization) that yield a powder of the active ingredient plus any additional desired ingredient from a previously sterile-filtered solution thereof.

[0692] The amount of active ingredient which can be combined with a carrier material to produce a single dosage form will vary depending upon the subject being treated, and the particular mode of administration. The amount of active ingredient which can be combined with a carrier material to produce a single dosage form will generally be that amount of the composition which produces a therapeutic effect. Generally, out of one hundred percent, this amount will range from about 0.01 percent to about ninety-nine percent of active ingredient, preferably from about 0.1 percent to about 70 percent, most preferably from about 1 percent to about 30 percent of active ingredient in combination with a pharmaceutically acceptable carrier.

[0693] Dosage regimens are adjusted to provide the optimum desired response (e.g., a therapeutic response). For example, a single bolus may be administered, several divided doses may be administered over time or the dose may be proportionally reduced or increased as indicated by the exigencies of the therapeutic situation. It is especially advantageous to formulate parenteral compositions in dosage unit form for ease of administration and uniformity of dosage. Dosage unit form as used herein refers to physically discrete units suited as unitary dosages for the subjects to be treated; each unit contains a predetermined quantity of active compound calculated to produce the desired therapeutic effect in association with the required pharmaceutical carrier. The specification for the dosage unit forms described herein are dictated by and directly dependent on (a) the unique characteristics of the active compound and the particular therapeutic effect to be achieved, and (b) the limitations inherent in the art of compounding such an active compound for the treatment of sensitivity in individuals.

[0694] For administration of the antibody or antigen binding fragment thereof, the dosage ranges from about 0.0001 to 100 mg/kg, and more usually 0.01 to 5 or 10 mg/kg, of the host body weight. For administration of the antibody or antigen binding fragment thereof, the dosage ranges from about 0.0001 to 100 mg. An exemplary treatment regime entails administration once per week, once every two weeks, once every three weeks, once every four weeks, once a month, once every 3 months or once every three to 6 months.

[0695] An antibody can be administered as a sustained release formulation, in which case less frequent administration is required. Dosage and frequency vary depending on the half-life of the antibody in the patient. In general, human antibodies show the longest half-life, followed by humanized antibodies, chimeric antibodies, and nonhuman antibodies. The dosage and frequency of administration can vary depending on whether the treatment is prophylactic or therapeutic. In prophylactic applications, a relatively low dosage is administered at relatively infrequent intervals over a long period of time. Some patients continue to receive treatment for the rest of their lives. In therapeutic applications, a relatively high dosage at relatively short intervals is sometimes required until progression of the disease is reduced or terminated, and preferably until the patient shows partial or complete amelioration of symptoms of disease. Thereafter, the patient can be administered a prophylactic regime.

[0696] Actual dosage levels of the active ingredients in the pharmaceutical compositions described herein may be varied so as to obtain an amount of the active ingredient which is effective to achieve the desired therapeutic response for a particular patient, composition, and mode of administration, without being toxic to the patient. The selected dosage level will depend upon a variety of pharmacokinetic factors including the activity of the particular compositions described herein employed, or the ester, salt or amide thereof, the route of administration, the time of administration, the rate of excretion of the particular compound being employed, the duration of the treatment, other drugs, compounds and/or materials used in combination with the particular compositions employed, the age, sex, weight, condition, general health and prior medical history of the patient being treated, and like factors well known in the medical arts.

[0697] The therapeutically effective dosage of an anti-LAP antibody or antigen binding fragment thereof in various embodiments results in a decrease in severity of disease symptoms, an increase in frequency and duration of disease symptom-free periods, or a prevention of impairment or disability due to the disease affliction. In the context of cancer, a therapeutically effective dose preferably results in increased survival, and/or prevention of further deterioration of physical symptoms associated with cancer. A therapeutically effective dose may prevent or delay onset of cancer, such as may be desired when early or preliminary signs of the disease are present.

[0698] A composition described herein can be administered via one or more routes of administration using one or more of a variety of methods known in the art. As will be appreciated by the skilled artisan, the route and/or mode of administration will vary depending upon the desired results. Preferred routes of administration for antibodies described herein include intravenous, intramuscular, intradermal, intraperitoneal, subcutaneous, spinal or other parenteral routes of administration, for example by injection or infusion. The phrase “parenteral administration” as used herein means modes of administration other than enteral and topical administration, usually by injection, and includes, without limitation, intravenous, intramuscular, intraarterial, intrathecal, intracapsular, intraorbital, intracardiac, intradermal, intraperitoneal, transtracheal, subcutaneous, subcuticular, intraarticular, subcapsular, subarachnoid, intraspinal, epidural and intrasternal injection and infusion.

[0699] Alternatively, an antibody or antigen binding fragment thereof described herein can be administered via a non-parenteral route, such as a topical, epidermal or mucosal route of administration, for example, intranasally, orally, vaginally, rectally, sublingually or topically.

[0700] The active compounds can be prepared with carriers that will protect the compound against rapid release, such as a controlled release formulation, including implants, transdermal patches, and microencapsulated delivery systems. Biodegradable, biocompatible polymers can be used, such as ethylene vinyl acetate, polyanhydrides, polyglycolic acid, collagen, polyorthoesters, and polylactic acid. Many methods for the preparation of such formulations are patented or generally known to those skilled in the art. See, e.g., Sustained and Controlled Release Drug Delivery Systems, J. R. Robinson, ed., Marcel Dekker, Inc., New York, 1978.

[0701] Therapeutic compositions can be administered with medical devices known in the art. For example, in a preferred embodiment, a therapeutic composition described herein can be administered with a needleless hypodermic injection device, such as the devices disclosed in U.S. Pat. Nos. 5,399,163; 5,383,851; 5,312,335; 5,064,413; 4,941,880; 4,790,824; or 4,596,556. Examples of well-known implants and modules for use with anti-LAP antibodies described herein include: U.S. Pat. No. 4,487,603, which discloses an implantable micro-infusion pump for dispensing medication at a controlled rate; U.S. Pat. No. 4,486,194, which discloses a therapeutic device for administering medicants through the skin; U.S. Pat. No. 4,447,233, which discloses a medication infusion pump for delivering medication at a precise infusion rate; U.S. Pat. No. 4,447,224, which discloses a variable flow implantable infusion apparatus for continuous drug delivery; U.S. Pat. No. 4,439,196, which discloses an osmotic drug delivery system having multi-chamber compartments; and U.S. Pat. No. 4,475,196, which discloses an osmotic drug delivery system. These patents are incorporated herein by reference. Many other such implants, delivery systems, and modules are known to those skilled in the art.

[0702] In certain embodiments, the anti-LAP antibodies or antigen binding fragments thereof described herein can be formulated to ensure proper distribution in vivo. For example, the blood-brain barrier (BBB) excludes many highly hydrophilic compounds. To ensure that the therapeutic compounds described herein cross the BBB (if desired, e.g., for brain cancers), they can be formulated, for example, in liposomes. For methods of manufacturing liposomes, see, e.g., U.S. Pat. Nos. 4,522,811; 5,374,548; and 5,399,331. The liposomes may comprise one or more moieties which are selectively transported into specific cells or organs, thus enhance targeted drug delivery (see, e.g., V. V. Ranade (1989) J. Clin. Pharmacol. 29:685). Exemplary targeting moieties include folate or biotin (see, e.g., U.S. Pat. No. 5,416,016 to Low et al.); mannosides (Umezawa et al., (1988) Biochem. Biophys. Res. Commun. 153:1038); antibodies (P. G. Bloeman et al. (1995) FEBS Lett. 357:140; M. Owais et al. (1995) Antimicrob. Agents Chemother. 39:180); surfactant protein A receptor (Briscoe et al. (1995) Am. J. Physiol. 1233:134); p120 (Schreier et al. (1994) J. Biol. Chem. 269:9090); see also K. Keinanen; M. L. Laukkanen (1994) FEBS Lett. 346:123; J. J. Killion; I. J. Fidler (1994) Immunomethods 4:273.

### IX. Uses and Methods

[0703] The antibodies, antibody compositions, and methods described herein have numerous in vitro and in vivo utilities.

[0704] For example, provided herein is a method of treating cancer comprising administering to a subject in need thereof an anti-LAP antibody or antigen binding fragment thereof described herein, such that the subject is treated, e.g., such that growth of cancerous tumors is inhibited or reduced and/or that the tumors regress and/or that prolonged survival is achieved.

[0705] In one embodiment, provided herein is a method of treating cancer comprising administering to a subject in need thereof an effective amount (e.g., a therapeutically effective amount) of an anti-LAP antibody described herein (or a bispecific antibody or immunoconjugate comprising the antibody). In some embodiments, the subject is administered a further therapeutic agent. In some embodiments, the further therapeutic agent is selected from the group consisting of: an anti-PD-1 antibody or an antigen binding fragment thereof, an anti-LAG3 antibody or an antigen biding portion thereof, an anti-VISTA antibody or an antigen binding fragment thereof, an anti-BTLA antibody or an antigen binding fragment thereof, an anti-TIM3 antibody or an antigen binding fragment thereof, an anti-CTLA4 antibody or an antigen binding fragment thereof, an anti-HVEM antibody or an antigen binding fragment thereof, an anti-CD27 antibody or an antigen binding fragment thereof, an anti-CD137 antibody or an antigen binding fragment thereof, an anti-OX40 antibody or an antigen binding fragment thereof, an anti-CD28 antibody or an antigen binding fragment thereof, an anti-PDL1 antibody or an antigen binding fragment thereof, an anti-PDL2 antibody or an antigen binding fragment thereof, an anti-GITR antibody or an antigen binding fragment thereof, an anti-ICOS antibody or an antigen binding fragment thereof, an anti-SIRPα antibody or an antigen binding fragment thereof, an anti-ILT2 antibody or an antigen binding fragment thereof, an anti-ILT3 antibody or an antigen binding fragment thereof, an anti-ILT4 antibody or an antigen binding fragment thereof, an anti-ILT5 antibody or an antigen binding fragment thereof, and an anti-4-1BB antibody or an antigen binding fragment thereof. In some embodiments, anti-PD1 antibody or antigen binding fragment thereof is pembrolizumab or an antigen biding fragment thereof. The heavy and light chain sequences of pembrolizumab are set forth in SEQ ID NOs: 2213 and 2214, respectively.

pembrolizumab heavy chain
(SEQ ID NO.: 2213)
QVQLVQSGVEVKKPGASVKVSCKASGYTFTNYYMYWVRQA
PGQGLEWMGGINPSNGGTNFNEKFKNRVTLTTDSSTTTAY
MELKSLQFDDTAVYYCARRDYRFDMGFDYWGQGTTVTVSS
ASTKGPSVFPLAPCSRSTSESTAALGCLVKDYFPEPVTVS
WNSGALTSGVHTFPAVLQSSGLYSLSSVVTVPSSSLGTKT
YTCNVDHKPSNTKVDKRVESKYGPPCPPCPAPEFLGGPSV
FLFPPKPKDTLMISRTPEVTCVVVDVSQEDPEVQFNWYVD
GVEVHNAKTKPREEQFNSTYRVVSVLTVLHQDWLNGKEYK
CKVSNKGLPSSIEKTISKAKGQPREPQVYTLPPSQEEMTK
NQVSLTCLVKGFYPSDIAVEWESNGQPENNYKTTPPVLDS
DGSFFLYSRLTVDKSRWQEGNVFSCSVMHEALHNHYTQKS
LSLSLGK
pembrolizumab light chain
(SEQ ID NO.: 2214)
EIVLTQSPATLSLSPGERATLSCRASKGVSTSGYSYLHWY
QQKPGQAPRLLIYLASYLESGVPARFSGSGSGTDFTLTIS
SLEPEDFA VYYCQHSRDLPLTFGGGTKVEIKRTVAAPSV
FIFPPSDEQLKSGTASVVCLLNNFYPREAKVQWKVDNALQ
SGNSQESVTEQDSKDSTYSLSSTLTLSKADYEKHKVYACE
VTHQGLSSPVTKSFNRGEC

[0706] In some embodiments, the further therapeutic agent is nivolumab. In various embodiments, the heavy and light chain sequences of nivolumab are set forth in comprising SEQ ID NOs. 2215 and 2216.

nivolumab heavy chain
(SEQ ID NO.: 2215)
QVQLVESGGGVVQPGRSLRLDCKASGITFSNSGMHWVRQA
PGKGLEWVAVIWYDGSKRYYADSVKGRFTISRDNSKNTLF
LQMNSLRAEDTAVYYCATNDDYWGQGTLVTVSSASTKGPS
VFPLAPCSRSTSESTAALGCLVKDYFPEPVTVSWNSGALT
SGVHTFPAVLQSSGLYSLSSVVTVPSSSLGTKTYTCNVDH
KPSNTKVDKRVESKYGPPCPPCPAPEFLGGPSVFLFPPKP
KDTLMISRTPEVTCVVVDVSQEDPEVQFNWYVDGVEVHNA
KTKPREEQFNSTYRVVSVLTVLHQDWLNGKEYKCKVSNKG
LPSSIEKTISKAKGQPREPQVYTLPPSQEEMTKNQVSLTC
LVKGFYPSDIAVEWESNGQPENNYKTTPPVLDSDGSFFLY
SRLTVDKSRWQEGNVFSCSVMHEALHNHYTQKSLSLSLGK
nivolumab light chain
(SEQ ID NO. 2216)
EIVLTQSPATLSLSPGERATLSCRASQSVSSYLAWYQQKP
GQAPRLLIYDASNRATGIPARFSGSGSGTDFTLTISSLEP
EDFAVYYCQQSSNWPRTFGQGTKVEIKRTVAAPSVFIFPP
SDEQLKSGTASVVCLLNNFYPREAKVQWKVDNALQSGNSQ
ESVTEQDSKDSTYSLSSTLTLSKADYEKHKVYACEVTHQG
LSSPVTKSFNRGEC

[0707] In some embodiments, the cancer is characterized by abnormal TGFβ activity. In some embodiments, the cancer is associated with fibrosis. In some embodiments, the cancer is associated with infiltration of CD4+ regulatory T cells. In some embodiments, the cancer is associated with infiltration of CD8+ regulatory T cells. In some embodiments, the cancer is associate with infiltration of regulatory B cells. In some embodiments, the cancer is associated with infiltration of myeloid-derived suppressor cells. In some embodiments, the cancer is associated with infiltration of tumor-associated macrophages. In some embodiments, the cancer is associated with infiltration of innate lymphoid cells. In some embodiments, the cancer is associated with infiltration of cancer-associated fibroblasts. In some embodiments, the cancer is associated with a radiation-related increase in the above cell types.

[0708] In some embodiments, the cancer is associated with an increased TGFβ1 activation signature. In some embodiments the cancer is associated with an EMT or an EMT signature. In some embodiments the cancer is associated with a tumor exhibiting an EMT or an EMT signature and immune infiltration. In some embodiments the cancer is associated with a tumor profile of immune exclusion. In some embodiments, the cancer is associated with increased LAP expression. In some embodiments, the cancer is associated with increased GARP expression. In some embodiments, the cancer is associated with increased LRRC33 expression.

[0709] Cancers whose growth may be inhibited using the anti-LAP antibodies described herein include, but are not limited to, carcinoma, lymphoma, blastoma, sarcoma, and leukemia. More particular examples of such cancers include, but are not limited to, basal cell carcinoma, biliary tract cancer; bladder cancer; bone cancer; brain and CNS cancer; breast cancer (e.g. estrogen-receptor positive breast cancer HER2-positive breast cancer; triple negative breast cancer); cancer of the peritoneum; cervical cancer; cholangiocarcinoma; choriocarcinoma; colon and rectum cancer; connective tissue cancer; cancer of the digestive system; endometrial cancer; esophageal cancer; eye cancer; cancer of the head and neck; gastric cancer (including gastrointestinal cancer); glioblastoma; liver cancer (e.g. hepatocellular carcinoma; hepatoma); intra-epithelial neoplasm; kidney or renal cancer; larynx cancer; leukemia; lung cancer (e.g., small-cell lung cancer, non-small cell lung cancer, adenocarcinoma of the lung, and squamous carcinoma of the lung); lymphoma including Hodgkin's and non-Hodgkin's lymphoma; melanoma; myeloma; neuroblastoma; oral cavity cancer (e.g., lip, tongue, mouth, and pharynx); ovarian cancer; pancreatic cancer; prostate cancer; retinoblastoma; rhabdomyosarcoma; rectal cancer; cancer of the respiratory system; salivary gland carcinoma; sarcoma; skin cancer; squamous cell cancer; teratocarcinoma; testicular cancer; thyroid cancer; uterine or endometrial cancer; cancer of the urinary system; vulval cancer; as well as other carcinomas and sarcomas; as well as B-cell lymphoma (including low grade/follicular non-Hodgkin's lymphoma (NHL); small lymphocytic (SL) NHL; intermediate grade/follicular NHL; intermediate grade diffuse NHL; high grade immunoblastic NHL; high grade lymphoblastic NHL; high grade small non-cleaved cell NHL; bulky disease NHL; mantle cell lymphoma; AIDS-related lymphoma; and Waldenstrom's Macroglobulinemia); chronic lymphocytic leukemia (CLL); acute lymphoblastic leukemia (ALL); Hairy cell leukemia; chronic myeloblasts leukemia; and post-transplant lymphoproliferative disorder (PTLD), as well as abnormal vascular proliferation associated with phakomatoses, edema (such as that associated with brain tumors), tumors of primitive origins and Meigs' syndrome.

[0710] Additional cancers which can be treated using the anti-LAP antibodies or antigen binding fragments thereof described herein include metastatic pancreatic cancer, metastatic adenocarcinoma of the pancreas, stomach cancer, fibrotic cancer, glioma, malignant glioma, diffuse intrinsic pontine glioma, recurrent childhood brain neoplasm renal cell carcinoma, clear-cell metastatic renal cell carcinoma, metastatic castration resistant prostate cancer, stage IV prostate cancer, metastatic melanoma, malignant melanoma, recurrent melanoma of the skin, melanoma brain metastases, malignant melanoma of head and neck, squamous cell non-small cell lung cancer, metastatic breast cancer, follicular lymphoma, advanced B-cell NHL, HL including diffuse large B-cell lymphoma (DLBCL), multiple myeloma, chronic myeloid leukemia, adult acute myeloid leukemia in remission, adult acute myeloid leukemia with Inv(16)(p13.1q22), CBFB-MYH11, adult acute myeloid leukemia with t(16:16) (p13.1:q22), CBFB-MYH11, adult acute myeloid leukemia with t(8:21)(d22:q22), RUNX1-RUNX1T1, adult acute myeloid leukemia with t(9:11)(p22:q23), MLLT3-MLL, adult acute promyelocytic leukemia with tO15:17)(q22:q12), PML-RARA, alkylating agent-related acute myeloid leukemia, Richter's syndrome, adult glioblastoma, adult gliosarcoma, recurrent glioblastoma, recurrent childhood rhabdomyosarcoma, recurrent ewing sarcoma/peripheral primitive neuroectodermal tumor, recurrent neuroblastoma, recurrent osteosarcoma, colorectal cancer, MSI positive colorectal cancer, MSI negative colorectal cancer, nasopharyngeal nonkeratinizing carcinoma, recurrent nasopharyngeal undifferentiated carcinoma, cervical adenocarcinoma, cervical adenosquamous carcinoma; cervical squamous cell carcinoma, recurrent cervical carcinoma, anal canal squamous cell carcinoma, metastatic anal canal carcinoma, recurrent anal canal carcinoma, recurrent head and neck cancer, squamous cell of head and neck, head and neck squamous cell carcinoma (HNSCC), ovarian carcinoma, colon cancer, advanced GI cancer, gastric adenocarcinoma, gastroesophageal junction adenocarcinoma, bone neoplasms, soft tissue sarcoma, bone sarcoma, thymic carcinoma, urothelial carcinoma, merkel cell carcinoma, recurrent merkel cell carcinoma, mycosis fungoides, Sezary syndrome, neuroendocrine cancer, nasopharyngeal cancer, basal cell skin cancer, squamous cell skin cancer, dermatofibrosarcoma trotuberans, glioma, mesothelioma, myelodysplastic syndromes (MDS), myelofibrosis (MF), myeloproliferative neoplasms, and acute myeloid leukemia (AMVL). Cancers may be metastatic or may be primary cancers. Cancers may be desmoplastic or non-desmoplastic. Cancers may be recurrent cancers.

[0711] In some embodiments, the anti-LAP antibodies or antigen binding fragments thereof described herein are used to treat myelodysplastic syndromes (MDS). MDS are a diverse group of malignant disorders marked by bone marrow failure due to defective hematopoiesis and production of dysplastic cells. TGFβ is a primary driver in MDS (Geyh et al., Haematologica 2018; 103:1462-71) and agents that inhibit the function of TGFβ have been proposed as therapeutics (Mies et al., Curr Hematol Malig Rep 2016; 11:416-24). Furthermore, MDSCs are known to be dysregulated in MDS (Chen et al., JCI 2013; 123:4595-611) and agents that reduce MDSC levels in the bone marrow are potential therapeutics.

[0712] In some embodiments, the anti-LAP antibodies or antigen binding fragments thereof described herein are used to treat myelofibrosis, which is another myeloid malignancy in which TGFβ1 plays a central role (Mascarenhas et al., Leukemia & Lymphoma 2014; 55:450-2).

[0713] In some embodiments, the cancer is resistant to checkpoint inhibitor(s). In some embodiments, the cancer is intrinsically refractory or resistant (e.g., resistant to a PD-1 pathway inhibitor, PD-1 pathway inhibitor, or CTLA-4 pathway inhibitor). In some embodiments, the resistance or refractory state of the cancer is acquired. In some embodiments, the anti-LAP antibodies or antigen binding fragments thereof described herein can be used in combination with checkpoint inhibitors to overcome resistance of the cancer to the checkpoint inhibitors. In some embodiments, the anti-LAP antibodies or antigen binding fragments thereof described herein can be used to treat tumors with a mesenchymal and/or EMT signature together with checkpoint inhibitors in combination or sequentially with agents that induce a mesenchymal phenotype, such as MAPK pathway inhibitors.

[0714] In some embodiments, the anti-LAP antibodies or antigen binding fragments thereof described herein are used to enhance the viability of immune cells ex vivo, e.g., in adoptive NK cell transfer. Accordingly, in some embodiments, anti-LAP antibodies are used in combination with adoptively transferred NK cells to treat cancer.

[0715] In some embodiments, the anti-LAP antibodies or antigen binding fragments thereof described herein are used to treat tumors with MHC loss or MHC down-regulation, as monotherapy or in combination with NK activating or enhancing treatment. In some embodiments, the anti-LAP antibodies described herein are used to treat checkpoint inhibitor resistant tumors in combination with NK activating or enhancing treatment.

[0716] Also provided herein is a method of treating cancer associated with an increased number of circulating platelets or an increased platelet to lymphocyte ratio comprising administering to a subject in need thereof an effective amount of an antibody or antigen binding fragment thereof described herein which specifically binds to LAP, wherein the antibody binds to platelets but does not cause platelet aggregation or platelet degranulation.

[0717] The ability of a compound to inhibit cancer can be evaluated in an animal model system predictive of efficacy in human tumors. Alternatively, this property of a composition can be evaluated by examining the ability of the compound to inhibit using in vitro assays known to the skilled practitioner. A therapeutically effective amount of a therapeutic compound can decrease tumor size, or otherwise ameliorate symptoms in a subject. One of ordinary skill in the art would be able to determine such amounts based on such factors as the subject's size, the severity of the subject's symptoms, and the particular composition or route of administration selected.

[0718] Also encompassed are methods for detecting the presence of LAP-TGFβ1 in a sample (e.g., a tumor biopsy sample), or measuring the amount of LAP-TGFβ1 in sample, comprising contacting the sample (e.g., tumor tissue) and a control sample (e.g., corresponding healthy tissue) with an antibody (e.g., monoclonal antibody) or antigen binding fragment thereof described herein which specifically binds to LAP-TGFβ1 under conditions that allow for formation of a complex between the antibody or portion thereof and LAP-TGFβ1. The formation of a complex is then detected, wherein a difference in complex formation between the sample compared to the control sample is indicative of the presence of LAP-TGFβ1 in the sample. The anti-LAP antibodies or antigen binding fragments thereof described herein can also be used to purify LAP-TGFβ1 via immunoaffinity purification.

[0719] Diagnostic applications of the anti-LAP antibodies described herein are also contemplated.

[0720] In one embodiment, provided herein is a method of diagnosing a cancer associated with regulatory T cell infiltration comprising contacting a biological sample from a patient afflicted with the cancer with an anti-LAP antibody or antigen binding fragment thereof described herein which binds to regulatory T cells, wherein positive staining with the antibody indicates the cancer is associated with regulatory T cell infiltration.

[0721] In another embodiment, provided herein is a method of diagnosing a cancer associated with GARP-negative suppressive cells comprising contacting a biological sample from a patient afflicted with the cancer with an anti-LAP antibody or antigen binding fragment thereof described herein which binds to GARP-negative suppressive cells, wherein positive staining with the antibody and negative staining with an anti-GARP antibody indicates the cancer is associated with GARP-negative suppressive cells.

[0722] In another embodiment, provided herein is a method of selecting a patient afflicted with cancer for treatment with an anti-LAP antibody or antigen binding fragment thereof described herein, comprising contacting a biological sample from the patient with the antibody, wherein positive staining with the antibody indicates the cancer is amenable to treatment with the antibody.

[0723] In another embodiment, provided herein is a method of determining the response of a patient afflicted with cancer to treatment with an anti-LAP antibody or antigen binding fragment thereof described herein comprising contacting a biological sample from the patient with the antibody, wherein reduced staining with the antibody indicates the cancer is responding to treatment with the antibody.

[0724] In another embodiment, provided herein is a method of determining whether a cancer in a patient has metastasized comprising (a) identifying a patient having a cancer, (b) administering a labeled (e.g., radiolabeled) anti-LAP antibody or antigen binding fragment thereof described herein to the patient and determining the biodistribution of the labeled anti-LAP antibody, and (c) periodically repeating step (b) to determine whether the biodistribution of the labeled anti-LAP antibody has changed, wherein a change in the biodistribution of the labeled anti-LAP antibody is indicative that the cancer has metastasized.

[0725] Also provided are methods of treating fibrosis with the anti-LAP antibodies described herein. In one embodiment, provided herein is a method of treating fibrosis comprising administering to a subject in need thereof an effective amount of an antibody or antigen binding fragment thereof described herein. In some embodiments, the fibrosis is associated with cancer. In some embodiments, the fibrosis is associated with increased levels of myeloid-derived suppressor cells (e.g. Fernandez et al., Eur Respir J 2016; 48:1171-83).

[0726] Exemplary fibrotic disorders which can be treated with any of the anti-LAP antibodies or antigen binding fragment thereof described herein include, but are not limited to, heart fibrosis, muscle fibrosis, skin fibrosis, liver fibrosis, soft tissue (e.g., mediastinum or retroperitoneum) fibrosis, renal fibrosis, bone marrow fibrosis, intestinal fibrosis, joint (e.g., knee, shoulder or other joints) fibrosis, pulmonary fibrosis, idiopathic pulmonary fibrosis, cystic fibrosis, endomyocardial fibrosis, mediastinal fibrosis, myelofibrosis, retroperitoneal fibrosis, progressive massive fibrosis, pipestem fibrosis, nephrogenic systemic fibrosis, Crohn's disease, keloid, old myocardial infarction, scleroderma/systemic sclerosis, subepithelial fibrosis, arthrofibrosis, some forms of adhesive capsulitis, proliferative fibrosis, viral hepatitis induced fibrosis, drug-induced fibrosis, radiation-induced fibrosis, and fibrosis associated with cancer.

[0727] Also provided herein is a method of reducing the number of immunosuppressive cells in a patient before, during, or after transplantation comprising administering an effective amount of any of the anti-LAP antibodies or antigen binding fragments thereof described herein to a patient before undergoing transplantation, during transplantation, and/or after transplantation. In some embodiments, the anti-LAP antibodies or antigen binding fragments thereof improve graft survival.

[0728] Inhibition of TGFβ has been shown to restore regenerative failure by reducing senescence and enhancing liver regeneration, in a model of acute liver disease (acetaminophen injury mouse model) (Bird et al., Sci Transl Med 2018; 10:eaan1230). Accordingly, also provided herein is a method of increasing the regenerative response in acute organ injury (e.g., acute liver injury) comprising administering to a subject with acute organ injury an effective amount of the anti-LAP antibodies or antigen binding fragments thereof described herein.

[0729] Aberrant activation of TGFβ has been shown to initiate the onset of temporomandibular joint osteoarthritis (Zheng et al., Bone Res 2018; 6:26). Accordingly, also provided herein is a method of treating a patient with temporomandibular joint osteoarthritis comprising administering to the patient an effective amount of the anti-LAP antibodies or antigen binding fragments thereof described herein to treat the temporomandibular joint osteoarthritis.

[0730] LAP-TGFβ1 has also been shown to mediate the differentiation of CD4+ effector cells into productively and latently infected central memory T cells during HIV-1 infection (Cheung et al., J Viol 2018; 92:e01510-17). Accordingly, also provided herein is a method of treating a patient with HIV-1 infection (or a patient at risk of developing HIV-1 infection) comprising administering to the patient an effective amount of the anti-LAP antibodies or antigen binding fragments thereof described herein to treat the HIV-1 infection (e.g., inhibit differentiation of CD4+ effector cells into productively and latently infected central memory T cells).

[0731] TGFβ-expressing macrophages and suppressive regulatory T cells have been shown to be altered in the peritoneal fluid of patients with endometriosis (Hanada et al., Reprod Biol Endocrinol 2018; 16:9), suggesting that targeting LAP-TGFb1 expressed on these cells may be beneficial for treating the disorder. Accordingly, also provided herein is a method of treating a patient with endometriosis comprising administering to the patient an effective amount of the anti-LAP antibodies or antigen binding fragments thereof described herein to treat the endometriosis.

[0732] LAP-TGFβ1-expressing CD4+ T cells and CD14+ monocytes and macrophages have been shown to be increased in patients carrying multidrug resistant Mycobacterium tuberculosis (Basile et al., Clin Exp Immunol 2016; 187:160), suggesting that targeting LAP-TGFβ1 expressed on these cells may be beneficial for treating the infection. Accordingly, also provided herein is a method of treating a patient with multidrug resistant Mycobacterium tuberculosis comprising administering to the patient an effective amount of the anti-LAP antibodies or antigen binding fragments thereof described herein (e.g., anti-LAP antibodies which inhibit LAP-TGFβ1 activation) to treat the infection.

[0733] In some embodiments, the anti-LAP antibodies or antigen binding fragments thereof described herein are used to treat p-thalassemia, a disorder in which TGFβ superfamily members have been implicated in defective erythropoiesis (Dussiot et al. Nat Med 2014; 20:398-407).

[0734] In certain embodiments, the anti-LAP antibody or antigen binding fragment can be used as monotherapy to treat a disease or disorder (e.g., cancer). Alternatively, an anti-LAP antibody or antigen binding fragment thereof can be used in conjunction with another agent or therapy, e.g., an anti-cancer agent, a chemotherapeutic agent, an immunosuppressive agent, an immunostimulatory agent, an immune checkpoint inhibitor, an anti-inflammatory agent, or a cell therapy, as described in more detail below.

### Combination Therapy

[0735] The anti-LAP antibodies or antigen binding fragments thereof described herein can be used in combination with various treatments or agents (or in the context of a multispecific antibody or bifunctional partner) known in the art for the treatment of cancer, as described herein.

[0736] Suitable anti-cancer agents for use in combination therapy with the anti-LAP antibodies or antigen binding fragments thereof described herein include, but are not limited to, surgery, chemotherapeutic agents, growth inhibitory agents, cytotoxic agents, radiotherapy and agents used in radiation therapy, anti-angiogenesis agents, apoptotic agents, anti-tubulin agents, and other agents to treat cancer, such as anti-HER-2 antibodies (e.g., HERCEPTIN®), anti-CD20 antibodies, an epidermal growth factor receptor (EGFR) antagonist (e.g., a tyrosine kinase inhibitor), HER1/EGFR inhibitor (e.g., erlotinib (TARCEVA®)), platelet derived growth factor inhibitors (e.g., GLEEVEC (Imatinib Mesylate)), a COX-2 inhibitor (e.g., celecoxib), interferons, cytokines, antagonists (e.g., neutralizing antibodies) that bind to one or more of the following targets PD 1, PDL1, PDL2 (e.g., pembrolizumab; nivolumab; MK-3475; AMP-224; MPDL3280A; MEDIO680; MSB0010718C; and/or MEDI4736); CTLA4 (e.g., tremelimumab (PFIZER) and ipilimumab); LAG3 (e.g., BMS-986016); CD 103; TIM-3 and/or other TIM family members; CEACAM-1 and/or other CEACAM family members, ErbB2, ErbB3, ErbB4, PDGFR-beta, BlyS, APRIL, BCMA or VEGF receptor(s), TRAIL/Apo2, PARP inhibitors (e.g., AZD-2281, Lynparza Olaparib, Rubraca Rucaparib; (Zejula) niraparib), DNA damage repair inhibitors (e.g., ATMi, ATRi, DNAPKi), and other bioactive and organic chemical agents.

[0737] Combinations thereof are also specifically contemplated for the methods described herein. Suitable chemotherapeutic agents for use in combination therapy with the anti-LAP antibodies or antigen binding fragments thereof described herein include, but are not limited to, alkylating agents such as thiotepa and CYTOXAN® cyclosphosphamide; temozolomide; alkyl sulfonates such as busulfan, improsulfan and piposulfan; aziridines such as benzodopa, carboquone, meturedopa, and uredopa; ethylenimines and methylamelamines including altretamine, triethylenemelamine, trietylenephosphoramide, triethiylenethiophosphoramide and trimethylolomelamine; acetogenins (especially bullatacin and bullatacinone); a camptothecin (including the synthetic analogue topotecan); bryostatin; callystatin; CC-1065 (including its adozelesin, carzelesin and bizelesin synthetic analogues); cryptophycins (particularly cryptophycin 1 and cryptophycin 8); dolastatin; duocarmycin (including the synthetic analogues, KW-2189 and CB 1-TM1); eleutherobin; pancratistatin; a sarcodictyin; spongistatin; nitrogen mustards such as chlorambucil, chlornaphazine, cholophosphamide, estramustine, ifosfamide, mechlorethamine, mechlorethamine oxide hydrochloride, melphalan, novembichin, phenesterine, prednimustine, trofosfamide, uracil mustard; nitrosureas such as carmustine, chlorozotocin, fotemustine, lomustine, nimustine, and ranimnustine; antibiotics such as the enediyne antibiotics (e.g., calicheamicin, especially calicheamicin gammall and calicheamicin omegal 1 (see, e.g., Agnew, Chem. Intl. Ed. Engl., 33: 183-186 (1994)); dynemicin, including dynemicin A; bisphosphonates, such as clodronate; an esperamicin; as well as neocarzinostatin chromophore and related chromoprotein enediyne antiobiotic chromophores), aclacinomysins, actinomycin, authramycin, azaserine, bleomycins, cactinomycin, carabicin, caminomycin, carzinophilin, chromomycinis, dactinomycin, daunorubicin, detorubicin, 6-diazo-5-oxo-L-norleucine, ADRIAMYCIN® doxorubicin (including morpholino-doxorubicin, cyanomorpholino-doxorubicin, 2-pyrrolino-doxorubicin and deoxydoxorubicin), epirubicin, esorubicin, idarubicin, marcellomycin, mitomycins such as mitomycin C, mycophenolic acid, nogalamycin, olivomycins, peplomycin, potfiromycin, puromycin, quelamycin, rodorubicin, streptonigrin, streptozocin, tubercidin, ubenimex, zinostatin, zorubicin; anti-metabolites such as methotrexate and 5-fluorouracil (5-FU); folic acid analogues such as denopterin, methotrexate, pteropterin, trimetrexate; purine analogs such as fludarabine, 6-mercaptopurine, thiamiprine, thioguanine; pyrimidine analogs such as ancitabine, azacitidine, 6-azauridine, carmofur, cytarabine, dideoxyuridine, doxifluridine, enocitabine, floxuridine; androgens such as calusterone, dromostanolone propionate, epitiostanol, mepitiostane, testolactone; anti-adrenals such as aminoglutethimide, mitotane, trilostane; folic acid replenisher such as frolinic acid; aceglatone; aldophosphamide glycoside; aminolevulinic acid; eniluracil; amsacrine; bestrabucil; bisantrene; edatraxate; defofamine; demecolcine; diaziquone; elformithine; elliptinium acetate; an epothilone; etoglucid; gallium nitrate; hydroxyurea; lentinan; lonidainine; maytansinoids such as maytansine and ansamitocins; mitoguazone; mitoxantrone; mopidanmol; nitraerine; pentostatin; phenamet; pirarubicin; losoxantrone; podophyllinic acid; 2-ethylhydrazide; procarbazine; PSK® polysaccharide complex (JHS Natural Products, Eugene, Oreg.); razoxane; rhizoxin; sizofuran; spirogermanium; tenuazonic acid; triaziquone; 2,2′,2″-trichlorotriethylamine; trichothecenes (especially T-2 toxin, verracurin A, roridin A and anguidine); urethan; vindesine; dacarbazine; mannomustine; mitobronitol; mitolactol; pipobroman; gacytosine; arabinoside (“Ara-C”); cyclophosphamide; thiotepa; taxoids, e.g., TAXOL® paclitaxel (Bristol-Myers Squibb Oncology, Princeton, N.J.), ABRAXANE® Cremophor-free, albumin-engineered nanoparticle formulation of paclitaxel (American Pharmaceutical Partners, Schaumberg, 111.), and TAXOTERE® doxetaxel (Rhone-Poulenc Rorer, Antony, France); chloranbucil; GEMZAR® gemcitabine; 6-thioguanine; mercaptopurine; methotrexate; platinum analogs such as cisplatin, oxaliplatin and carboplatin, vinblastine; platinum; etoposide (VP-16); ifosfamide; mitoxantrone; vincristine; NAVELBINE, vinorelbine; novantrone; teniposide; edatrexate; daunomycin; aminopterin; xeloda; ibandronate; irinotecan (Camptosar, CPT-11) (including the treatment regimen of irinotecan with 5-FU and leucovorin); topoisomerase inhibitor RFS 2000; difluoromethylornithine (DMFO); retinoids such as retinoic acid; capecitabine; combretastatin; leucovorin (LV); oxaliplatin, including the oxaliplatin treatment regimen (FOLFOX); lapatinib (TYKERB); inhibitors of PKC-alpha, Raf, H-Ras, EGFR (e.g., erlotinib (TARCEVA®)) and VEGF-A that reduce cell proliferation and pharmaceutically acceptable salts, acids or derivatives of any of the above.

[0738] Also suitable for use in combination with the anti-LAP antibodies or antigen binding fragments thereof described herein are drugs targeting epigenetic regulators, such as HDAC inhibitors, bromodomain inhibitors, and E3 ligase (e.g., cereblon) inhibitors (e.g., lenalidomide, pomalidomide, and thalidomide).

[0739] Suitable anti-inflammatory agents for use in combination therapy with the anti-LAP antibodies or antigen binding fragments thereof described herein include, but are not limited to, aspirin and other salicylates, Cox-2 inhibitors (e.g., rofecoxib and celecoxib), NSAIDs (such as ibuprofen, fenoprofen, naproxen, sulindac, diclofenac, piroxicam, ketoprofen, diflunisal, nabumetone, etodolac, oxaprozin, and indomethacin), anti-IL6R antibodies, anti-IL8 antibodies, anti-IL15 antibodies, anti-TL15R antibodies, anti-CD4 antibodies, anti-CD11a antibodies (e.g., efalizumab), anti-alpha-4/beta-1 integrin (VLA4) antibodies (e.g., natalizumab), CTLA4-Ig for the treatment of inflammatory diseases, prednisolone, prednisone, disease modifying antirheumatic drugs (DMARDs) such as methotrexate, hydroxychloroquine, sulfasalazine, pyrimidine synthesis inhibitors (e.g., leflunomide), IL-1 receptor blocking agents (e.g., anakinra), TNF-α blocking agents (e.g., etanercept, infliximab, and adalimumab), and the like.

[0740] Suitable immunomodulatory agents (e.g., immunostimulatory and immunosuppressive agents) include, but are not limited to, cyclosporine, azathioprine, mycophenolic acid, mycophenolate mofetil, corticosteroids such as prednisone, methotrexate, gold salts, sulfasalazine, antimalarials, brequinar, leflunomide, mizoribine, 15-deoxyspergualine, 6-mercaptopurine, cyclophosphamide, rapamycin, tacrolimus (FK-506), OKT3, anti-thymocyte globulin, thymopentin, thymosin-α, antibodies that bind to p75 of the IL-2 receptor, antibodies that bind to MHC, CD2, CD3, CD4, CD7, CD28, B7, CD40, CD45, IFN-γ, TNF-α, IL-4, IL-5, IL-6R, IL-6, IGF, IGFR1, IL-7, IL-8, IL-10, CD11a, or CD58, or antibodies binding to their ligands, soluble IL-15R, IL-10, B7 molecules (B7-1, B7-2, variants thereof, and fragments thereof), ICOS, OX40, an inhibitor of a negative T cell regulator (such as an antibody against CTLA4), and the like.

[0741] Additional immunosuppressive agents include, for example, anti-TNF agents such as etanercept, adalimumab and infliximab, and steroids. Examples of specific natural and synthetic steroids include, for example: aldosterone, beclomethasone, betamethasone, budesonide, cloprednol, cortisone, cortivazol, deoxycortone, desonide, desoximetasone, dexamethasone, difluorocortolone, fluclorolone, flumethasone, flunisolide, fluocinolone, fluocinonide, fluocortin butyl, fluorocortisone, fluorocortolone, fluorometholone, flurandrenolone, fluticasone, halcinonide, hydrocortisone, icomethasone, meprednisone, methylprednisolone, paramethasone, prednisolone, prednisone, tixocortol, and triamcinolone.

[0742] Suitable immunostimulatory agents for use in combination therapy with the anti-LAP antibodies or antigen binding fragments thereof described herein include, for example, compounds capable of stimulating antigen presenting cells (APCs), such as dendritic cells (DCs) and macrophages. For example, suitable immunostimulatory agents are capable of stimulating APCs, so that the maturation process of the APCs is accelerated, the proliferation of APCs is increased, and/or the recruitment or release of co-stimulatory molecules (e.g., CD80, CD86, ICAM-1, MHC molecules and CCR7) and pro-inflammatory cytokines (e.g., IL-1β, IL-6, IL-12, IL-15, and IFN-γ) is upregulated. Suitable immunostimulatory agents are also capable of increasing T cell proliferation. Such immunostimulatory agents include, but are not be limited to, CD40 ligand; FLT 3 ligand; cytokines, such as IFN-α, IFN-β, IFN-7 and IL-2; colony-stimulating factors, such as G-CSF (granulocyte colony-stimulating factor) and GM-CSF (granulocyte-macrophage colony-stimulating factor); an anti-CTLA-4 antibody, anti-PD1 antibody, anti-41BB antibody, or anti-OX-40 antibody; LPS (endotoxin); ssRNA; dsRNA; Bacille Calmette-Guerin (BCG); Levamisole hydrochloride; and intravenous immune globulins. In one embodiment an immunostimulatory agent may be a Toll-like Receptor (TLR) agonist. For example the immunostimulatory agent may be a TLR3 agonist such as double-stranded inosine:cytosine polynucleotide (Poly I:C, for example available as Ampligen™ from Hemispherx Bipharma, PA, US or Poly IC:LC from Oncovir) or Poly A:U; a TLR4 agonist such as monophosphoryl lipid A (MPL) or RC-529 (for example as available from GSK, UK); a TLR5 agonist such as flagellin; a TLR7 or TLR8 agonist such as an imidazoquinoline TLR7 or TLR 8 agonist, for example imiquimod (e.g., Aldara™) or resiquimod and related imidazoquinoline agents (e.g., as available from 3M Corporation); or a TLR 9 agonist such as a deoxynucleotide with unmethylated CpG motifs (“CpGs”, e.g., as available from Coley Pharmaceutical). In another embodiment, the immunostimulatory molecule is a STING agonist. Such immunostimulatory agents may be administered simultaneously, separately or sequentially with the anti-LAP antibodies or antigen binding fragments thereof described herein.

[0743] Suitable immune checkpoint blockers include, but are not limited to, agents (e.g., antibodies) that bind to PD-1, PD-L1, PD-L2, LAG-3, CTLA4, TIGIT, ICOS, OX40, PVR, PVRIG, VISTA, and TIM3. Non-limiting examples of antibodies that bind to PD-1, PD-L1, and PD-L2 include pembrolizumab; nivolumab; MK-3475; MPDL32; MEDIO680; MEDI4736; AMP-224; and MSB0010718C.

[0744] In some embodiments, the anti-LAP antibody or antigen binding fragment thereof is administered with an agent that targets a stimulatory or inhibitory molecule that is a member of the immunoglobulin super family (IgSF). For example, the anti-LAP antibodies or antigen binding fragments thereof described herein, may be administered to a subject with an agent that targets a member of the IgSF family to increase an immune response. For example, an anti-LAP antibody or antigen binding fragment thereof may be administered with an agent that targets a member of the B7 family of membrane-bound ligands that includes B7-1, B7-2, B7-H1 (PD-L1), B7-DC (PD-L2), B7-H2 (ICOS-L), B7-H3, B7-H4, B7-H5 (VISTA), and B7-H6 or a co-stimulatory or co-inhibitory receptor binding specifically to a B7 family member.

[0745] An anti-LAP antibody or antigen binding fragment thereof described herein may also be administered with an agent that targets a member of the TNF and TNFR family of molecules (ligands or receptors), such as CD40 and CD40L, OX-40, OX-40L, CD70, CD27L, CD30, CD30L, 4-1BBL, CD137, TRAIL/Apo2-L, TRAILR1/DR4, TRAILR2/DR5, TRAILR3, TRAILR4, OPG, RANK, RANKL, TWEAKR/Fni4, TWEAK, BAFFR, EDAR, XEDAR, TACI, APRIL, BCMA, LTOR, LIGHT, DcR3, HVEM, VEGI/TL1A, TRAMP/DR3, EDA1, EDA2, TNFR1, Lymphotoxin α/TNFβ, TNFR2, TNFα, LTβR, Lymphotoxin α 1β2, FAS, FASL, RELT, DR6, TROY, and NGFR (see, e.g., Tansey (2009) Drug Discovery Today 00:1).

[0746] T cell responses can be stimulated by a combination of anti-LAP antibodies or antigen binding fragments thereof described herein and one or more of the following agents:
[0747] (1) An antagonist (inhibitor or blocking agent) of a protein that inhibits T cell activation (e.g., immune checkpoint inhibitors), such as CTLA-4, PD-1, PD-L1, PD-L2, and LAG-3, as described above, and any of the following proteins: TIM-3, Galectin 9, CEACAM-1, BTLA, CD69, Galectin-1, TIGIT, CD 113, CD155, GPR56, VISTA, B7-H3, B7-H4, 2B4, CD48, GARP, PD1H, LAIR1, TIM-1, and TIM-4; and/or
[0748] (2) An agonist of a protein that stimulates T cell activation, such as B7-1, B7-2, CD28, 4-1BB (CD137), 4-1BBL, GITR, ICOS, ICOS-L, OX40, OX40L, CD70, CD27, CD40, DR3 and CD28H.

[0749] Exemplary agents that modulate the above proteins and may be combined with the anti-LAP antibodies or antigen binding fragments thereof described herein for treating cancer, include: Yervoy™ (ipilimumab) or Tremelimumab (to CTLA-4), galiximab (to B7.1), BMS-936558 (to PD-1), MK-3475 (to PD-1), AMP224 (to B7DC), BMS-936559 (to B7-H1), MPDL3280A (to B7-H1), MEDI-570 (to ICOS), AMG557 (to B7H2), MGA271 (to B7H3), IMP321 (to LAG-3), BMS-663513 (to CD137), PF-05082566 (to CD137), CDX-1127 (to CD27), anti-OX40 (Providence Health Services), huMAbOX40L (to OX40L), Atacicept (to TACI), CP-870893 (to CD40), Lucatumumab (to CD40), Dacetuzumab (to CD40), Muromonab-CD3 (to CD3), Ipilumumab (to CTLA-4).

[0750] Other molecules that can be combined with anti-LAP antibodies or antigen binding fragments thereof described herein for the treatment of cancer include antagonists of inhibitory receptors on NK cells or agonists of activating receptors on NK cells. For example, anti-LAP antibodies or antigen binding fragments thereof can be combined with antagonists of KIR (e.g., lirilumab).

[0751] T cell activation is also regulated by soluble cytokines, and anti-LAP antibodies may be administered to a subject, e.g., having cancer, with antagonists of cytokines that inhibit T cell activation or agonists of cytokines that stimulate T cell activation.

[0752] In certain embodiments, anti-LAP antibodies or antigen binding fragments thereof described herein can be used in combination with (i) antagonists (or inhibitors or blocking agents) of proteins of the IgSF family or B7 family or the TNF family that inhibit T cell activation or antagonists of cytokines that inhibit T cell activation (e.g., IL-6, IL-10, TGF-β, VEGF; “immunosuppressive cytokines”) and/or (ii) agonists of stimulatory receptors of the IgSF family, B7 family or the TNF family or of cytokines that stimulate T cell activation, for stimulating an immune response, e.g., for treating proliferative diseases, such as cancer.

[0753] Yet other agents for combination therapies include agents that inhibit or deplete macrophages or monocytes, including but not limited to CSF-1R antagonists such as CSF-1R antagonist antibodies including RG7155 (see PCT publication numbers WO11/70024, WO11/107553, WO11/131407, WO13/87699, WO13/119716, and WO13/132044) or FPA-008 (see PCT publication numbers WO11/140249; WO13169264; and WO14/036357).

[0754] Additional agents that may be combined with anti-LAP antibodies or antigen binding fragments thereof described herein include agents that enhance tumor antigen presentation, e.g., dendritic cell vaccines, GM-CSF secreting cellular vaccines, CpG oligonucleotides, and imiquimod, or therapies that enhance the immunogenicity of tumor cells (e.g., anthracyclines).

[0755] Another therapy that may be combined with anti-LAP antibodies or antigen binding fragments thereof described herein is a therapy that inhibits a metabolic enzyme such as indoleamine dioxygenase (IDO), tryptophan-2,3-dioxygenase, dioxygenase, arginase, or nitric oxide synthetase.

[0756] Another class of agents that may be used with anti-LAP antibodies or antigen binding fragments thereof described herein includes agents that inhibit the formation of adenosine or inhibit the adenosine A2A receptor, for example, anti-CD73 antibodies, anti-CD39 antibodies, and adenosine A2A/A2b inhibitors.

[0757] Other therapies that may be combined with anti-LAP antibodies or antigen binding fragments thereof described herein for treating cancer include therapies that reverse/prevent T cell anergy or exhaustion and therapies that trigger an innate immune activation and/or inflammation at a tumor site.

[0758] The anti-LAP antibodies or antigen binding fragments thereof described herein may be combined with a combinatorial approach that targets multiple elements of the immune pathway, such as one or more of the following: a therapy that enhances tumor antigen presentation (e.g., dendritic cell vaccine, GM-CSF secreting cellular vaccines, CpG oligonucleotides, imiquimod); a therapy that inhibits negative immune regulation e.g., by inhibiting CTLA-4 and/or PD1/PD-L1/PD-L2 pathway and/or depleting or blocking regulatory T cells or other immune suppressing cells; a therapy that stimulates positive immune regulation, e.g., with agonists that stimulate the CD-137 and/or GITR pathway and/or stimulate T cell effector function; a therapy that increases systemically the frequency of anti-tumor T cells; a therapy that depletes or inhibits regulatory T cells using an antagonist of CD25 (e.g., daclizumab) or by ex vivo anti-CD25 bead depletion; a therapy that impacts the function of suppressor myeloid cells in the tumor; a therapy that enhances immunogenicity of tumor cells (e.g., anthracyclines); cell therapy with adoptive T cell or NK cell transfer including genetically modified cells, e.g., cells modified by chimeric antigen receptors (CAR-T therapy); a therapy that inhibits a metabolic enzyme such as indoleamine dioxygenase (IDO), dioxygenase, arginase, or nitric oxide synthetase; a therapy that reverses/prevents T cell anergy or exhaustion; a therapy that triggers an innate immune activation and/or inflammation at a tumor site; administration of immune stimulatory cytokines; or blocking of immunosuppressive or immunorepressive cytokines.

[0759] The anti-LAP antibodies or antigen binding fragments thereof described herein can be combined with proinflammatory cytokines, for example, IL-12 and IL-2. These cytokines can be modified to enhance half-life and tumor targeting.

[0760] The anti-LAP antibodies or antigen binding fragments thereof described herein can be combined with immune cell engagers such as NK cell engagers or T cell engagers.

[0761] The anti-LAP antibodies or antigen binding fragments thereof described herein can be combined with indoleamine dioxygenase (IDO) inhibitors, tryptophan-2,3-dioxygenase (TDO) inhibitors, and dual IDO/TDO inhibitors.

[0762] The anti-LAP antibodies or antigen binding fragments thereof described herein can be combined with kynurine inhibitors.

[0763] The anti-LAP antibodies or antigen binding fragments thereof described herein can be combined with CD47 and/or SIRPa blocking therapies.

[0764] The anti-LAP antibodies or antigen binding fragments thereof described herein can be combined with JAK inhibitors and JAK pathway inhibitors (e.g., STAT3 inhibitors), e.g., for the treatment of myelofibrosis and myeloproliferative neoplasms.

[0765] The anti-LAP antibodies or antigen binding fragments thereof described herein can be combined with DNA damage repair inhibitors.

[0766] The anti-LAP antibodies or antigen binding fragments thereof described herein can be combined with erythropoietin and drugs that stimulate hematopoiesis.

[0767] The anti-LAP antibodies or antigen binding fragments thereof described herein can be combined with angiogenesis inhibitors.

[0768] The anti-LAP antibodies or antigen binding fragments thereof described herein can be combined with anti-viral drugs, such as neuramidase inhibitors.

[0769] Bispecific antibodies which have a first binding region with the specificity of the anti-LAP antibodies or antigen binding fragments thereof described herein and a second binding region which binds to an immune checkpoint blocker (e.g., PD-1, PD-L1) can be used in combination with at least one additional anti-cancer agent (e.g., radiation, chemotherapeutic agents, biologics, vaccines) to inhibit tumor growth.

[0770] The anti-LAP antibodies or antigen binding fragments thereof described herein can be combined with one or more immunostimulatory antibodies, such as an anti-PD-1 antagonist antibody, an anti-PD-L1 antagonist antibody, an antagonist anti-CTLA-4 antibody, an antagonistic anti-TIM3 antibody, and/or an anti-LAG3 antagonist antibody, such that an immune response is stimulated in the subject, for example to inhibit tumor growth.

[0771] Exemplary anti-PD-1 antibodies include nivolumab, pembrolizumab(also known as MK-3475,Lambrolizumab) described in WO2012/145493; AMP-514 described in WO 2012/145493, as well as PD-1 antibodies and other PD-1 inhibitors described in WO 2009/014708, WO 03/099196, WO 2009/114335, WO 2011/066389, WO 2011/161699, WO 2012/145493, U.S. Pat. Nos. 7,635,757 and 8,217,149, and U.S. Patent Publication No. 2009/0317368.

[0772] Exemplary anti-PD-L1 antibodies include MEDI4736 (also known as Anti-B7-H1), MPDL3280A (also known as RG7446), MSB0010718C (WO2013/79174), rHigM12B7, as well as any of the anti-PD-L1 antibodies disclosed in WO2013/173223, WO2011/066389, WO2012/145493, U.S. Pat. Nos. 7,635,757 and 8,217,149 and U.S. Publication No. 2009/145493.

[0773] Exemplary anti-CTLA-4 antibodies include Yervoy™ (ipilimumab), tremelimumab (formerly ticilimumab, CP-675,206), or an anti-CTLA-4 antibody described in any of the following publications: WO 98/42752; WO 00/37504; U.S. Pat. No. 6,207,156; Hurwitz et al. (1998) Proc. Natl. Acad. Sci. USA 95(17):10067-10071; Camacho et al. (2004)J. Clin. Oncology 22(145): Abstract No. 2505 (antibody CP-675206); and Mokyr et al. (1998) Cancer Res. 58:5301-5304.

[0774] Exemplary anti-LAG3 antibodies include IMP731 and IMP-321, described in US Publication No. 2011/007023, and PCT publication numbers WO08/132601, and WO09/44273, as well as antibodies described in U.S. Patent Publication No. US2011/0150892, and international patent publication numbers WO10/19570 and WO2014/008218.

[0775] Anti-LAP antibodies or antigen binding fragments thereof can also be combined with immune-oncology agents such as CD137 (4-1BB) agonists (e.g., an agonistic CD137 antibody such as urelumab or PF-05082566 (see PCT publication number WO12/32433)); GITR agonists (e.g., an agonistic anti-GITR antibody), CD40 agonists (e.g., an agonistic CD40 antibody); CD40 antagonists (e.g., an antagonistic CD40 antibody such as lucatumumab (HCD122), dacetuzumab (SGN-40), CP-870,893 or Chi Lob 7/4); CD27 agonists (e.g., an agonistic CD27 antibody such as varlilumab (CDX-1127)), MGA271 (to B7H3) (WO11/109400)); KIR antagonists (e.g., lirilumab); IDO antagonists (e.g., INCB-024360 (WO2006/122150, WO07/75598, WO08/36653, WO08/36642), indoximod, NLG-919 (WO09/73620, WO09/1156652, WO11/56652, WO12/142237) or F001287); Toll-like receptor agonists (e.g., TLR2/4 agonists (e.g., Bacillus Calmette-Guerin); TLR7 agonists (e.g., Hiltonol or Imiquimod); TLR7/8 agonists (e.g., Resiquimod); or TLR9 agonists (e.g., CpG7909)); and TGF-β inhibitors (e.g., GC1008, LY2157299, TEW7197, or IMC-TR1).

[0776] The anti-LAP antibodies or antigen binding fragments thereof described herein can also be combined with an immunogenic agent, such as cancerous cells, purified tumor antigens (including recombinant proteins, peptides, and carbohydrate molecules), cells, and cells transfected with genes encoding immune stimulating cytokines (He et al. (2004) J. Immunol. 173:4919-28). Non-limiting examples of tumor vaccines that can be used include peptides of melanoma antigens, such as peptides of gp100, MAGE antigens, Trp-2, MART1 and/or tyrosinase, or tumor cells transfected to express the cytokine GM-CSF (discussed further below).

[0777] The anti-LAP antibodies or antigen binding fragments thereof described herein can also be combined with an anti-neoplastic antibody, such as Rituxan® (rituximab), Herceptin® (trastuzumab), Bexxar® (tositumomab), Zevalin® (ibritumomab), Campath® (alemtuzumab), Lymphocide® (eprtuzumab), Avastin® (bevacizumab), and Tarceva® (erlotinib), and the like.

[0778] Several experimental treatment protocols involve ex vivo activation and expansion of antigen specific T cells and adoptive transfer of these cells into recipients in order to antigen-specific T cells against tumor (Greenberg & Riddell, supra). Ex vivo activation in the presence of the anti-LAP antibodies described herein with or without an additional immunostimulating therapy (e.g., an immune checkpoint blocker) can be expected to increase the frequency and activity of the adoptively transferred T cells.

[0779] The anti-LAP antibody or antigen binding fragment thereof may also be administered with a standard of care treatment, or another treatment, such as radiation, surgery, or chemotherapy. The anti-LAP antibody or antigen binding fragment thereof may be combined with a vaccination protocol. Many experimental strategies for vaccination against tumors have been devised (see Rosenberg, S., 2000, Development of Cancer Vaccines, ASCO Educational Book Spring: 60-62; Logothetis, C., 2000, ASCO Educational Book Spring: 300-302; Khayat, D. 2000, ASCO Educational Book Spring: 414-428; Foon, K. 2000, ASCO Educational Book Spring: 730-738; see also Restifo, N. and Sznol, M., Cancer Vaccines, Ch. 61, pp. 3023-3043 in DeVita et al. (eds.), 1997, Cancer: Principles and Practice of Oncology, Fifth Edition). In one of these strategies, a vaccine is prepared using autologous or allogeneic tumor cells. These cellular vaccines have been shown to be most effective when the tumor cells are transduced to express GM-CSF. GM-CSF has been shown to be a potent activator of antigen presentation for tumor vaccination (Dranoff et al. (1993) Proc. Natl. Acad. Sci U.S.A. 90: 3539-43). Dendritic cells (DC) are potent antigen presenting cells that can be used to prime antigen-specific responses. DC's can be produced ex vivo and loaded with various protein and peptide antigens as well as tumor cell extracts (Nestle et al. (1998) Nature Medicine 4: 328-332). DCs can also be transduced by genetic means to express these tumor antigens as well. DCs have also been fused directly to tumor cells for the purposes of immunization (Kugler et al. (2000) Nature Medicine 6:332-336). As a method of vaccination, DC immunization can be effectively combined with the anti-LAP antibodies or antigen binding fragments thereof described herein to activate more potent anti-tumor responses.

[0780] In some embodiments, the combination of therapeutic antibodies discussed herein can be administered concurrently as a single composition in a pharmaceutically acceptable carrier, or concurrently as separate compositions with each antibody in a pharmaceutically acceptable carrier. In another embodiment, the combination of therapeutic antibodies can be administered sequentially.

### X. Kits

[0781] Also provided are kits comprising the anti-LAP antibodies or antigen binding fragments thereof, multispecific molecules, or immunoconjugates disclosed herein, optionally contained in a single vial or container, and include, e.g., instructions for use in treating or diagnosing a disease (e.g., cancer). The kits may include a label indicating the intended use of the contents of the kit. The term label includes any writing, marketing materials or recorded material supplied on or with the kit, or which otherwise accompanies the kit. Such kits may comprise the antibody, multispecific molecule, or immunoconjugate in unit dosage form, such as in a single dose vial or a single dose pre-loaded syringe.

[0782] The present disclosure is further illustrated by the following examples, which should not be construed as further limiting. The contents of all figures and all references, Genbank sequences, patents, and published patent applications cited throughout this application are expressly incorporated herein by reference.

### EXAMPLES

[0783] Commercially available reagents referred to in the Examples below were used according to manufacturer's instructions unless otherwise indicated. Unless otherwise noted, the present invention uses standard procedures of recombinant DNA technology, such as those described hereinabove and in the following textbooks: Sambrook et al., supra; Ausubel et al., Current Protocols in Molecular Biology (Green Publishing Associates and Wiley Interscience, N.Y., 1989); Innis et al., PCR Protocols: A Guide to Methods and Applications (Academic Press, Inc.: N.Y., 1990); Harlow et al., Antibodies: A Laboratory Manual (Cold Spring Harbor Press: Cold Spring Harbor, 1988); Gait, Oligonucleotide Synthesis (IRL Press: Oxford, 1984); Freshney, Animal Cell Culture, 1987; Coligan et al., Current Protocols in Immunology, 1991.

### Example 1: Generation of LAP-TGFβ Target Proteins

[0784] Affinity-enhanced variants generated as described below were initially screened against fusion proteins consisting of residues 1-361 from human LAP-TGFβ1, a flexible linker containing a TEV protease site (GSTTENLYEQGSTG; SEQ ID NO: 93), and residues 118-447 (Eu numbering) from human IgG (SEQ ID NO: 1; Table 2). Similar constructs containing homologous residues from human LAP-TGFβ2, human LAP-TGFβ3, cynomolgus monkey LAP-TGFβ1, rat LAP-TGFβ31 and mouse LAP-TGFβ1 were also used to confirm binding specificity (Table 2). Some of these constructs used an alternative linker (GGGGSGGGGSGGGGS; SEQ ID NO: 94) and/or C4S/R249S to enhance stability. See, for example, SEQ ID NO: 5.

[0785] In Table 2 and subsequent Tables, unless indicated otherwise, it is understood that the CDRs in the binding protein (e.g., antibody or antigen binding fragment thereof) are identified by Kabat. Note that CDR(s) in a heavy chain variable region, light chain variable region, heavy chain, and/or light chain might be defined and identified by any of the methods and systems described herein (e.g., Chothia, Kabat, and IMGT in Table 1).

TABLE 2
LAP-TGFB-Fc fusion protein sequences

| SEQ | | |
|---|---|---|
| ID | | |
| NO. | Description | Amino acid sequence |
| 1 | human LAP-TGFB1 | MPPSGLRLLLLLLPLLWLLVLTPGRPAAGLSTCKTIDMELVKR |
| | Fc fusion | KRIEAIRGQILSKLRLASPPSQGEVPPGPLPEAVLALYNSTRD |
| | | RVAGESAEPEPEPEADYYAKEVTRVLMVETHNEIYDKFKQSTH |
| | | STYMFENTSELREAVPEPVLLSRAELRLLRLKLKVEQHVELYQ |
| | | KYSNNSWRYLSNRLLAPSDSPEWLSFDVTGVVRQWLSRGGEIE |
| | | GFRLSAHCSCDSRDNTLQVDINGFTTGRRGDLATIHGMNRPFL |
| | | LLMATPLERAQHLQSSRHRRALDTNYCFSSTEKNCCVRQLYID |
| | | FRKDLGWKWIHEPKGYHANFCLGPCPYIWSLDTQYSKVLALYN |
| | | QHNPGASAAPCCVPQALEPLPIVYYVGRKPKVEQLSNMIVRSC |
| | | KCSGSTTENLYFQGSTGTHTCPPCPAPELLGGPSVFLFPPKPK |
| | | DTLMISRTPEVTCVVVDVSHEDPEVKFNWYVDGVEVHNAKTKP |
| | | REEQYNSTYRVVSVLTVLHQDWLNGKEYKCKVSNKALPAPIEK |
| | | TISKAKGQPREPQVYTLPPSREEMTKNQVSLTCLVKGFYPSDI |
| | | AVEWESNGQPENNYKTTPPVLDSDGSFFLYSKLTVDKSRWQQG |
| | | NVFSCSVMHEALHNHYTQKSLSLSPGK |
| 2 | human LAP-TGFB2 | MHYCVLSAFLILHLVTVALSLSTSSTLDMDQFMRKRIEAIRGQ |
| | Fc fusion | ILSKLKLTSPPEDYPEPEEVPPEVISIYNSTRDLLQEKASRRA |
| | | AACERERSDEEYYAKEVYKIDMPPFFPSENAIPPTFYRPYFRI |
| | | VREDVSAMEKNASNLVKAEFRVFRLQNPKARVPEQRIELYQIL |
| | | KSKDLTSPTQRYIDSKVVKTRAEGEWLSFDVTDAVHEWLHHKD |
| | | RNLGFKISLHCPCCTFVPSNNYIIPNKSEELEARFAGIDGTST |
| | | YTSGDQKTIKSTRKKNSGKTPHLLLMLLPSYRLESQQTNRRKK |
| | | SALDAAYCFRNVQDNCCLRPLYIDFKRDLGWKWIHEPKGYNAN |
| | | FCAGACPYLWSSDTQHSRVLSLYNTINPEASASPCCVSQDLEP |
| | | LTILYYIGKTPKIEQLSNMIVKSCKCSGGGGSGGGGSGGGGSE |
| | | PKSCDKTHTCPPCPAPELLGGPSVFLFPPKPKDTLMISRTPEV |
| | | TCVVVDVSHEDPEVKFNWYVDGVEVHNAKTKPREEQYNSTYRV |
| | | VSVLTVLHQDWLNGKEYKCKVSNKALPAPIEKTISKAKGQPRE |
| | | PQVYTLPPSREEMTKNQVSLTCLVKGFYPSDIAVEWESNGQPE |
| | | NNYKTTPPVLDSDGSFFLYSKLTVDKSRWQQGNVFSCSVMHEA |
| | | LHNHYTQKSLSLSPGK |
| 3 | human LAP-TGFB3 | MKMHLQRALVVLALLNFATVSLSLSTCTTLDFGHIKKKRVEAI |
| | Fc fusion | RGQILSKLRLTSPPEPTVMTHVPYQVLALYNSTRELLEEMHGE |
| | | REEGCTQENTESEYYAKEIHKFDMIQGLAEHNELAVCPKGITS |
| | | KVFRFNVSSVEKNRTNLFRAEFRVLRVPNPSSKRNEQRIELFQ |
| | | ILRPDEHIAKORYIGGKNLPTRGTAEWLSFDVTDTVREWLLRR |
| | | ESNLGLEISIHCPCHTFQPNGDILENIHEVMEIKFKGVDNEDD |
| | | HGRGDLGRLKKQKDHHNPHLILMMIPPHRLDNPGQGGQRKKSA |
| | | LDTNYCFRNLEENCCVRPLYIDFRQDLGWKWVHEPKGYYANFC |
| | | SGPCPYLRSADTTHSTVLGLYNTLNPEASASPCCVPQDLEPLT |
| | | ILYYVGRTPKVEQLSNMVVKSCKCSGGGGSGGGGSGGGGSEPK |
| | | SCDKTHTCPPCPAPELLGGPSVFLFPPKPKDTLMISRTPEVTC |
| | | VVVDVSHEDPEVKENWYVDGVEVHNAKTKPREEQYNSTYRVVS |
| | | VLTVLHQDWLNGKEYKCKVSNKALPAPIEKTISKAKGQPREPQ |
| | | VYTLPPSREEMTKNQVSLTCLVKGFYPSDIAVEWESNGQPENN |
| | | YKTTPPVLDSDGSFFLYSKLTVDKSRWQQGNVFSCSVMHEALH |
| | | NHYTQKSLSLSPGK |
| 4 | mouse LAP-TGFB1 | MPPSGLRLLPLLLPLPWLLVLTPGRPAAGLSTCKTIDMELVKR |
| | Fc fusion | KRIEAIRGQILSKLRLASPPSQGEVPPGPLPEAVLALYNSTRD |
| | | RVAGESADPEPEPEADYYAKEVTRVLMVDRNNAIYEKTKDISH |
| | | SIYMFFNTSDIREAVPEPPLLSRAELRLQRLKSSVEQHVELYQ |
| | | KYSNNSWRYLGNRLLTPTDTPEWLSFDVTGVVRQWLNQGDGIQ |
| | | GFRFSAHCSCDSKDNKLHVEINGISPKRRGDLGTIHDMNRPFL |
| | | LLMATPLERAQHLHSSRHRRALDTNYCFSSTEKNCCVRQLYID |
| | | FRKDLGWKWIHEPKGYHANFCLGPCPYIWSLDTQYSKVLALYN |
| | | QHNPGASASPCCVPQALEPLPIVYYVGRKPKVEQLSNMIVRSC |
| | | KCSGSTTENLYFQGSTGTHTCPPCPAPELLGGPSVFLFPPKPK |
| | | DTLMISRTPEVTCVVVDVSHEDPEVKFNWYVDGVEVHNAKTKP |
| | | REEQYNSTYRVVSVLTVLHQDWLNGKEYKCKVSNKALPAPIEK |
| | | TISKAKGQPREPQVYTLPPSREEMTKNQVSLTCLVKGFYPSDI |
| | | AVEWESNGQPENNYKTTPPVLDSDGSFFLYSKLTVDKSRWQQG |
| | | NVFSCSVMHEALHNHYTQKSLSLSPGK |
| 5 | rat LAP-TGFB1 | MPPSGLRLLLLLLPLLWLLVLTPGRPAAGLSTSKTIDMELVKR |
| | Fc fusion | KRIEAIRGQILSKLRLASPPSQGEVPPGPLPEAVLALYNSTRD |
| | | RVAGESADPEPEPEADYYAKEVTRVLMVDRNNAIYDKTKDITH |
| | | SIYMFFNTSDIREAVPEPPLLSRAELRLQRFKSTVEQHVELYQ |
| | | KYSNNSWRYLGNRLLTPTDTPEWLSFDVTGVVRQWLNQGDGIQ |
| | | GFRFSAHCSCDSKDNVLHVEINGISPKRRGDLGTIHDMNRPFL |
| | | LLMATPLERAQHLHSSRHRSALDTNYCFSSTEKNCCVRQLYID |
| | | FRKDLGWKWIHEPKGYHANFCLGPCPYIWSLDTQYSKVLALYN |
| | | QHNPGASASPCCVPQALEPLPIVYYVGRKPKVEQLSNMIVRSC |
| | | KCSGGGGSGGGGSGGGGSTHTCPPCPAPELLGGPSVFLFPPKP |
| | | KDTLMISRTPEVTCVVVDVSHEDPEVKENWYVDGVEVHNAKTK |
| | | PREEQYNSTYRVVSVLTVLHQDWLNGKEYKCKVSNKALPAPIE |
| | | KTISKAKGQPREPQVYTLPPSREEMTKNQVSLTCLVKGFYPSD |
| | | IAVEWESNGQPENNYKTTPPVLDSDGSFFLYSKLTVDKSRWQQ |
| | | GNVFSCSVMHEALHNHYTQKSLSLSPGK |
| 6 | cyno LAP-TGFB1 | MPPSGLRLLLLLLPLLWLLVLTPGRPAAGLSTSKTIDMELVKR |
| | | KRIEAIRGQILSKLRLASPPSQGEVPPGPLPEAVLALYNSTRD |
| | | RVAGESAEPEPEPEADYYAKEVTRVLMVETHNEIYDKFKQSTH |
| | | SIYMFFNTSELREAVPEPVLLSRAELRLLRLKLKVEQHVELYQ |
| | | KYSNNSWRYLSNRLLAPSDSPEWLSFDVTGVVRQWLSRGGEIE |
| | | GFRLSAHCSCDSKDNTLQVDINGFTTGRRGDLATIHGMNRPFL |
| | | LLMATPLERAQHLQSSRHRRALDTNYCFSSTEKNCCVRQLYID |
| | | FRKDLGWKWIHEPKGYHANFCLGPCPYIWSLDTQYSKVLALYN |
| | | QHNPGASAAPCCVPQALEPLPIVYYVGRKPKVEQLSNMIVRSC |
| | | KCSGSTTENLYFQGSTGTHTCPPCPAPELLGGPSVFLFPPKPK |
| | | DTLMISRTPEVTCVVVDVSHEDPEVKFNWYVDGVEVHNAKTKP |
| | | REEQYNSTYRVVSVLTVLHQDWLNGKEYKCKVSNKALPAPIEK |
| | | TISKAKGQPREPQVYTLPPSREEMTKNQVSLTCLVKGFYPSDI |
| | | AVEWESNGQPENNYKTTPPVLDSDGSFFLYSKLTVDKSRWQQG |
| | | NVFSCSVMHEALHNHYTQKSLSLSPGK |

[0786] Codon-optimized genes for the amino-acid sequences described in Table 1 were subcloned into pcDNA3.4 for protein expression. These plasmids were transfected into ExpiCHO cells to produce secreted fusion protein in the culture medium. The host cells were removed by centrifugation (4,000×g) for 10 minutes, followed by filtration through a 0.22-micron sterile filter. Fusion proteins were isolated from filtered media by Protein A chromatography. Preparative size-exclusion chromatography was used to isolate monomeric LAP-TGFβ-Fc fusion protein (˜140 kDa).

[0787] To control for possible off-target binding to the human IgG1 Fc portion of the fusion protein, a human LAP-TGFβ1 protein with N-terminal polyhistidine and StrepTagII tags was produced (Table 3). A codon-optimized gene for this protein was subcloned into pcDNA3.4 for protein expression. The expression plasmid was transfected into ExpiCHO cells to produce secreted LAP-TGFβ1 in the culture medium. The LAP-TGFβ1 protein was purified by a sequence of NiNTA affinity chromatograph, cation-exchange chromatography and size-exclusion chromatography.

TABLE 3
His8-StrepTagII-TEV-LAP-TGFB1 sequence

| SEQ | Descrip- | |
|---|---|---|
| ID | tion | Sequence |
| 7 | human | MPPSGLRLLLLLLPLLWLLV |
| | LAP-TGFB1 | LTPGRPAAGHHHHHHHHGGG |
| | construct | SWSHPQFEKGGGSGGGSGGS |
| | with | SAWSHPQFEKENLYFQGLST |
| | leader | SKTIDMELVKRKRIEAIRGQ |
| | sequence | ILSKLRLASPPSQGEVPPGP |
| | | LPEAVLALYNSTRDRVAGES |
| | | AEPEPEPEADYYAKEVTRVL |
| | | MVETHNEIYDKFKQSTHSIY |
| | | MFFNTSELREAVPEPVLLSR |
| | | AELRLLRLKLKVEQHVELYQ |
| | | KYSNNSWRYLSNRLLAPSDS |
| | | PEWLSFDVTGVVRQWLSRGG |
| | | EIEGFRLSAHCSCDSRDNTL |
| | | QVDINGFTTGRRGDLATIHG |
| | | MNRPFLLLMATPLERAQHLQ |
| | | SSRHRSALDTNYCFSSTEKN |
| | | CCVRQLYIDERKDLGWKWIH |
| | | EPKGYHANFCLGPCPYIWSL |
| | | DTQYSKVLALYNQHNPGASA |
| | | APCCVPQALEPLPIVYYVGR |
| | | KPKVEQLSNMIVRSCKCS |

### Example 2. Production of 20E6 Variants Targeting LAP/TGFβ1

[0788] The 20E6 antigen-binding fragment (Fab) sequences were cloned into heavy and light chain expression plasmids for protein production. Combinations of heavy and light chain expression plasmids were co-transfected into ExpiCHO cells to produce secreted antibody in the culture medium. Various methods were used to produce Fab proteins at different scales. At a smaller scale, for screening purposes, the volume of culture was 5-mL and produced within a 24-deep well plate at 37° C., 250-RPM, 8% C02, and 80% relative humidity for the first 24-hours of expression, followed by 32° C., 250-RPM, 8% C02, and 80% relative humidity for the remainder of the expression period. At larger scales of expression, the total volume of culture ranged from 30-mL to 250-mL in Corning® shake flasks, non-baffled. The conditions of expressions were 37° C., 250-RPM, 8% CO2, and 80% relative humidity for the first 24-hours of expression, followed by 32° C., 125-RPM, 8% CO2, and 80% relative humidity for the remainder of the expression period.

[0789] Fab proteins were purified by KappaSelect affinity chromatography. Proteins were eluted using 20 mM sodium acetate (pH 3.0) and neutralized using 1 M tris(hydroxymethyl)aminomethane (TRIS) buffer at pH 8.0. Size-exclusion chromatography was used to characterize the homogeneity of the eluted antibody and concentration was measured using absorbance at 280 nm (A₂₈₀) with a calculated extinction co-efficient.

### Example 3: Molecular Interaction Analysis by ForteBio Interferometry

[0790] Anti-human Fab-CH1 2^{nd} generation (FAB2G, catalog 18-5125) biosensors were prepared for loading of purified Fab by soaking for 10 minutes in assay buffer, 1× phosphate buffered saline (PBS) 0.1% bovine serum albumin, BSA (10× PBS—Gibco, catalog 70013032, BSA—Jackson Immunoresearch, catalog 001-000-162). The Fab mutants including a positive control, 20E6 Fab, and a negative control Fab (Molecular Innovations, catalog HU-FAB-4510) were diluted to 200 nM in assay buffer and loaded to FAB2G sensors for 180 seconds followed by a one-hour incubation at room temperature in assay buffer to equilibrate the tips. The Fab loaded sensors were assessed for binding with 100 nM human LAP-TGFβ for 180 seconds followed by a 180 second dissociation phase in assay buffer on a ForteBio HTX (software version 9.0.0.66). Non-specific binding to the negative control Fab was subtracted and the binding sensorgrams were aligned to the start of the association phase on the X and Y axis. The Fab binding was fit with the 1:1 binding model, dissociation phase only, with local fitting using ForteBio Data Analysis 9.0 software.

### Example 4: Engineering Computationally Designed Variants

[0791] Further studies were performed with the 20E6 antibody and antigen-binding fragments thereof such that the molecules were engineered to include modifications to CDR residues within the variable domains of the humanized monoclonal antibody, e.g., to improve a property of the antibody or antigen binding fragment thereof. The modifications were made to increase the affinity of the antibody or antigen binding fragment thereof. Affinity enhancement using directed evolution methods have been shown to be effective for this purpose. The structure and interaction of 20E6 antibody and the LAP/TGF-beta structure were determined. Investigators then sought to investigate the applicability of computational methods to enhance affinity. Computational design methods have the ability to enhance antibody-antigen affinity. A variety of tools and methods for designing variants were implemented.

[0792] In order to generate a diverse set of computational designs to test experimentally, investigators utilized multiple computational approaches in parallel to design affinity enhancing mutants. These methods included: saturation mutagenesis (exhaustively sampling all possible single point mutations within the antigen binding region and the associated scoring of all resulting antibody-antigen complexes) through the independent application of molecular operating environment (MOE) modeling (https://www.schrodinger.com/BioLuminate/) and Bioluminate modeling by Schrodinger software, stochastic sequence sampling in MOE (extensively sampling single, double, and triple mutant combinations within the antigen binding region and the associated scoring of these sampled constructs), and multi-state modeling (Rosetta Design) to allow for greater flexibility in antigen binding during antibody mutant exploration than other methods would allow. In addition, visual structure-based modeling and design was used to generate an independent list of mutants that were added to the final list of constructs. Designs that scored highly by multiple methods which also passed visual inspection were prioritized and included in experimental characterization (Table 4).

TABLE 4
20E6 variants containing computationally designed
substitutions in selected CDR positions

| Seq | | |
|---|---|---|
| ID | | |
| NO. | Identifier | Amino acid sequence |
| 8 | VL R53D (35BIT) LCDR1 | RASQDITNYLN |
| 9 | VL R53D (35BIT) LCDR2 | YTSDLHS |
| 10 | VL R53D (35BIT) LCDR3 | QQGDTLPWT |
| 11 | VL R53D (35BIT) VL | DIQMTQSPSSLSASVGDRVTITCRASQDITNYLNWYQQKPGK |
| | | AVKLLIYYTSDLHSGVPSRFSGSGSGTDYTLTISSLQPEDFA |
| | | TYFCQQGDTLPWTFGQGTKLEIK |
| 12 | VL R53D (35BIT) LC | DIQMTQSPSSLSASVGDRVTITCRASQDITNYLNWYQQKPGK |
| | | AVKLLIYYTSDLHSGVPSRFSGSGSGTDYTLTISSLQPEDFA |
| | | TYFCQQGDTLPWTFGQGTKLEIKRTVAAPSVFIFPPSDEQLK |
| | | SGTASVVCLLNNFYPREAKVQWKVDNALQSGNSQESVTEQDS |
| | | KDSTYSLSSTLTLSKADYEKHKVYACEVTHQGLSSPVTKSEN |
| | | RGEC |
| 13 | VL R53I (34BIT) LCDR1 | RASQDITNYLN |
| 14 | VL R53I (34BIT) LCDR2 | YTSILHS |
| 15 | VL R53I (34BIT) LCDR3 | QQGDTLPWT |
| 16 | VL R53I (34BIT) VL | DIQMTQSPSSLSASVGDRVTITCRASQDITNYLNWYQQKPGK |
| | | AVKLLIYYTSILHSGVPSRFSGSGSGTDYTLTISSLQPEDFA |
| | | TYFCQQGDTLPWTFGQGTKLEIK |
| 17 | VL R53I (34BIT) LC | DIQMTQSPSSLSASVGDRVTITCRASQDITNYLNWYQQKPGK |
| | | AVKLLIYYTSILHSGVPSRFSGSGSGTDYTLTISSLQPEDFA |
| | | TYFCQQGDTLPWTFGQGTKLEIKRTVAAPSVFIFPPSDEQLK |
| | | SGTASVVCLLNNFYPREAKVQWKVDNALQSGNSQESVTEQDS |
| | | KDSTYSLSSTLTLSKADYEKHKVYACEVTHQGLSSPVTKSFN |
| | | RGEC |
| 18 | VL R53E (31BIT) LCDR1 | RASQDITNYLN |
| 19 | VL R53E (31BIT) LCDR2 | YTSELHS |
| 20 | VL R53E (31BIT) LCDR3 | QQGDTLPWT |
| 21 | VL R53E (31BIT) VL | DIQMTQSPSSLSASVGDRVTITCRASQDITNYLNWYQQKPGK |
| | | AVKLLIYYTSELHSGVPSRESGSGSGTDYTLTISSLQPEDFA |
| | | TYFCQQGDTLPWTFGQGTKLEIK |
| 22 | VL R53E (31BIT) LC | DIQMTQSPSSLSASVGDRVTITCRASQDITNYLNWYQQKPGK |
| | | AVKLLIYYTSELHSGVPSRFSGSGSGTDYTLTISSLQPEDFA |
| | | TYFCQQGDTLPWTFGQGTKLEIKRTVAAPSVFIFPPSDEQLK |
| | | SGTASVVCLLNNFYPREAKVQWKVDNALQSGNSQESVTEQDS |
| | | KDSTYSLSSTLTLSKADYEKHKVYACEVTHQGLSSPVTKSEN |
| | | RGEC |
| 23 | VL T30E (36BIT) LCDR1 | RASQDIENYLN |
| 24 | VL T30E (36BIT) LCDR2 | YTSRLHS |
| 25 | VL T30E (36BIT) LCDR3 | QQGDTLPWT |
| 26 | VL T30E (36BIT) VL | |
| | | TYFCQQGDTLPWTFGQGTKLEIK |
| 27 | VL T30E (36BIT) LC | DIQMTQSPSSLSASVGDRVTITCRASQDIENYLNWYQQKPGK |
| | | AVKLLIYYTSRLHSGVPSRFSGSGSGTDYTLTISSLQPEDFA |
| | | TYFCQQGDTLPWTFGQGTKLEIKRTVAAPSVFIFPPSDEQLK |
| | | SGTASVVCLLNNFYPREAKVQWKVDNALQSGNSQESVTEQDS |
| | | KDSTYSLSSTLTLSKADYEKHKVYACEVTHQGLSSPVTKSFN |
| | | RGEC |
| 28 | VL T30D (37BIT) LCDR1 | RASQDIDNYLN |
| 29 | VL T30D (37BIT) LCDR2 | YTSRLHS |
| 30 | VL T30D (37BIT) LCDR3 | QQGDTLPWT |
| 31 | VL T30D (37BIT) VL | DIQMTQSPSSLSASVGDRVTITCRASQDIDNYLNWYQQKPGK |
| | | AVKLLIYYTSRLHSGVPSRFSGSGSGTDYTLTISSLQPEDFA |
| | | TYFCQQGDTLPWTFGQGTKLEIK |
| 32 | VL T30D (37BIT) LC | DIQMTQSPSSLSASVGDRVTITCRASQDIDNYLNWYQQKPGK |
| | | AVKLLIYYTSRLHSGVPSRESGSGSGTDYTLTISSLQPEDFA |
| | | TYFCQQGDTLPWTFGQGTKLEIKRTVAAPSVFIFPPSDEQLK |
| | | SGTASVVCLLNNFYPREAKVQWKVDNALQSGNSQESVTEQDS |
| | | KDSTYSLSSTLTLSKADYEKHKVYACEVTHQGLSSPVTKSFN |
| | | RGEC |
| 33 | VL L94D (32BIT) LCDR1 | RASQDITNYLN |
| 34 | VL L94D (32BIT) LCDR2 | YTSRLHS |
| 35 | VL L94D (32BIT) LCDR3 | QQGDTDPWT |
| 36 | VL L94D (32BIT) VL | DIQMTQSPSSLSASVGDRVTITCRASQDITNYLNWYQQKPGK |
| | | AVKLLIYYTSRLHSGVPSRFSGSGSGTDYTLTISSLQPEDFA |
| | | TYFCQQGDTDPWTFGQGTKLEIK |
| 37 | VL L94D (32BIT) LC | DIQMTQSPSSLSASVGDRVTITCRASQDITNYLNWYQQKPGK |
| | | AVKLLIYYTSRLHSGVPSRESGSGSGTDYTLTISSLQPEDFA |
| | | TYFCQQGDTDPWTFGQGTKLEIKRTVAAPSVFIFPPSDEQLK |
| | | SGTASVVCLLNNFYPREAKVQWKVDNALQSGNSQESVTEQDS |
| | | KDSTYSLSSTLTLSKADYEKHKVYACEVTHQGLSSPVTKSFN |
| | | RGEC |
| 38 | VL L94Q (33BIT) LCDR1 | RASQDITNYLN |
| 39 | VL L94Q (33BIT) LCDR2 | YTSRLHS |
| 40 | VL L94Q (33BIT) LCDR3 | QQGDTQPWT |
| 41 | VL L94Q (33BIT) VL | DIQMTQSPSSLSASVGDRVTITCRASQDITNYLNWYQQKPGK |
| | | AVKLLIYYTSRLHSGVPSRFSGSGSGTDYTLTISSLQPEDFA |
| | | TYFCQQGDTQPWTFGQGTKLEIK |
| 42 | VL L94Q (33BIT) LC | DIQMTQSPSSLSASVGDRVTITCRASQDITNYLNWYQQKPGK |
| | | AVKLLIYYTSRLHSGVPSRFSGSGSGTDYTLTISSLQPEDFA |
| | | TYFCQQGDTQPWTFGQGTKLEIKRTVAAPSVFIFPPSDEQLK |
| | | SGTASVVCLLNNFYPREAKVQWKVDNALQSGNSQESVTEQDS |
| | | KDSTYSLSSTLTLSKADYEKHKVYACEVTHQGLSSPVTKSFN |
| | | RGEC |
| 43 | VH S31K (24BIT) HCDR1 | KYWMH |
| 44 | VH S31K (24BIT) HCDR2 | RIDPQSGGIKYAQKFQG |
| 45 | VH S31K (24BIT) HCDR3 | WDYGGYFDV |
| 46 | VH S31K (24BIT) VH | EVOLVQSGAEVKKPGASVKVSCKASGYTFTKYWMHWVRQAPG |
| | | QGLEWMGRIDPQSGGIKYAQKFQGRATLTVDTSTSTAYMELS |
| | | RLRSDDTAVYYCARWDYGGYFDVWGQGTLVTVSS |
| 47 | VH S31K (24BIT) Fab_HC | EVQLVQSGAEVKKPGASVKVSCKASGYTFTKYWMHWVRQAPG |
| | | QGLEWMGRIDPQSGGIKYAQKFQGRATLTVDTSTSTAYMELS |
| | | RLRSDDTAVYYCARWDYGGYFDVWGQGTLVTVSSASTKGPSV |
| | | FPLAPSSKSTSGGTAALGCLVKDYFPEPVTVSWNSGALTSGV |
| | | HTFPAVLQSSGLYSLSSVVTVPSSSLGTQTYICNVNHKPSNT |
| | | KVDKKVEPKSCDKTHT |
| 48 | VH S31R (25BIT) HCDR1 | RYWMH |
| 49 | VH S31R (25BIT) HCDR2 | RIDPQSGGIKYAQKFQG |
| 50 | VH S31R (25BIT) HCDR3 | WDYGGYFDV |
| 51 | VH S31R (25BIT) VH | EVQLVQSGAEVKKPGASVKVSCKASGYTFTRYWMHWVRQAPG |
| | | QGLEWMGRIDPQSGGIKYAQKFQGRATLTVDTSTSTAYMELS |
| | | RLRSDDTAVYYCARWDYGGYFDVWGQGTLVTVSS |
| 52 | VH S31R (25BIT) Fab_HC | EVQLVQSGAEVKKPGASVKVSCKASGYTFTRYWMHWVRQAPG |
| | | QGLEWMGRIDPQSGGIKYAQKFQGRATLTVDTSTSTAYMELS |
| | | RLRSDDTAVYYCARWDYGGYFDVWGQGTLVTVSSASTKGPSV |
| | | FPLAPSSKSTSGGTAALGCLVKDYFPEPVTVSWNSGALTSGV |
| | | HTFPAVLQSSGLYSLSSVVTVPSSSLGTQTYICNVNHKPSNT |
| | | KVDKKVEPKSCDKTHT |
| 53 | VH H35R (62BIT) HCDR1 | SYWMR |
| 54 | VH H35R (62BIT) HCDR2 | RIDPQSGGIKYAQKFQG |
| 55 | VH H35R (62BIT) HCDR3 | WDYGGYFDV |
| 56 | VH H35R (62BIT) VH | EVQLVQSGAEVKKPGASVKVSCKASGYTFTSYWMRWVRQAPG |
| | | QGLEWMGRIDPQSGGIKYAQKFQGRATLTVDTSTSTAYMELS |
| | | RLRSDDTAVYYCARWDYGGYFDVWGQGTLVTVSS |
| 57 | VH H35R (62BIT) Fab_HC | EVQLVQSGAEVKKPGASVKVSCKASGYTFTSYWMRWVRQAPG |
| | | QGLEWMGRIDPQSGGIKYAQKFQGRATLTVDTSTSTAYMELS |
| | | RLRSDDTAVYYCARWDYGGYFDVWGQGTLVTVSSASTKGPSV |
| | | FPLAPSSKSTSGGTAALGCLVKDYFPEPVTVSWNSGALTSGV |
| | | HTFPAVLQSSGLYSLSSVVTVPSSSLGTQTYICNVNHKPSNT |
| | | KVDKKVEPKSCDKTHT |
| 58 | VH H35K (30BIT) HCDR1 | SYWMK |
| 59 | VH H35K (30BIT) HCDR2 | RIDPQSGGIKYAQKFQG |
| 60 | VH H35K (30BIT) HCDR3 | WDYGGYFDV |
| 61 | VH H35K (30BIT) VH | EVQLVQSGAEVKKPGASVKVSCKASGYTFTSYWMKWVRQAPG |
| | | QGLEWMGRIDPQSGGIKYAQKFQGRATLTVDTSTSTAYMELS |
| | | RLRSDDTAVYYCARWDYGGYFDVWGQGTLVTVSS |
| 62 | VH H35K (30BIT) HC | EVQLVQSGAEVKKPGASVKVSCKASGYTFTSYWMKWVRQAPG |
| | | QGLEWMGRIDPQSGGIKYAQKFQGRATLTVDTSTSTAYMELS |
| | | RLRSDDTAVYYCARWDYGGYFDVWGQGTLVTVSSASTKGPSV |
| | | FPLAPSSKSTSGGTAALGCLVKDYFPEPVTVSWNSGALTSGV |
| | | HTFPAVLQSSGLYSLSSVVTVPSSSLGTQTYICNVNHKPSNT |
| | | KVDKKVEPKSCDKTHT |
| 63 | VH S55E (26BIT) HCDR1 | SYWMH |
| 64 | VH S55E (26BIT) HCDR2 | RIDPQEGGIKYAQKFQG |
| 65 | VH S55E (26BIT) HCDR3 | WDYGGYFDV |
| 66 | VH S55E (26BIT) VH | EVOLVQSGAEVKKPGASVKVSCKASGYTFTSYWMHWVRQAPG |
| | | QGLEWMGRIDPQEGGIKYAQKFQGRATLTVDTSTSTAYMELS |
| | | RLRSDDTAVYYCARWDYGGYFDVWGQGTLVTVSS |
| 67 | VH S55E (26BIT) Fab_HC | EVQLVQSGAEVKKPGASVKVSCKASGYTFTSYWMHWVRQAPG |
| | | QGLEWMGRIDPQEGGIKYAQKFQGRATLTVDTSTSTAYMELS |
| | | RLRSDDTAVYYCARWDYGGYFDVWGQGTLVTVSSASTKGPSV |
| | | FPLAPSSKSTSGGTAALGCLVKDYFPEPVTVSWNSGALTSGV |
| | | HTFPAVLQSSGLYSLSSVVTVPSSSLGTQTYICNVNHKPSNT |
| | | KVDKKVEPKSCDKTHT |
| 68 | VH G57E (63BIT) HCDR1 | SYWMH |
| 69 | VH G57E (63BIT) HCDR2 | RIDPQSGEIKYAQKFQG |
| 70 | VH G57E (63BIT) HCDR3 | WDYGGYFDV |
| 71 | VH G57E (63BIT) VH | EVQLVQSGAEVKKPGASVKVSCKASGYTFTSYWMHWVRQAPG |
| | | QGLEWMGRIDPQSGEIKYAQKFQGRATLTVDTSTSTAYMELS |
| | | RLRSDDTAVYYCARWDYGGYFDVWGQGTLVTVSS |
| 72 | VH G57E (63BIT) Fab_HC | EVQLVQSGAEVKKPGASVKVSCKASGYTFTSYWMHWVRQAPG |
| | | QGLEWMGRIDPQSGEIKYAQKFQGRATLTVDTSTSTAYMELS |
| | | RLRSDDTAVYYCARWDYGGYFDVWGQGTLVTVSSASTKGPSV |
| | | FPLAPSSKSTSGGTAALGCLVKDYFPEPVTVSWNSGALTSGV |
| | | HTFPAVLQSSGLYSLSSVVTVPSSSLGTQTYICNVNHKPSNT |
| | | KVDKKVEPKSCDKTHT |
| 73 | VH G57D (27BIT) HCDR1 | SYWMH |
| 74 | VH G57D (27BIT) HCDR2 | RIDPQSGDIKYAQKFQG |
| 75 | VH G57D (27BIT) HCDR3 | WDYGGYFDV |
| 76 | VH G57D (27BIT) VH | EVQLVQSGAEVKKPGASVKVSCKASGYTFTSYWMHWVRQAPG |
| | | QGLEWMGRIDPQSGDIKYAQKFQGRATLTVDTSTSTAYMELS |
| | | RLRSDDTAVYYCARWDYGGYFDVWGQGTLVTVSS |
| 77 | VH G57D (27BIT) Fab_HC | EVOLVQSGAEVKKPGASVKVSCKASGYTFTSYWMHWVRQAPG |
| | | QGLEWMGRIDPQSGDIKYAQKFQGRATLTVDTSTSTAYMELS |
| | | RLRSDDTAVYYCARWDYGGYFDVWGQGTLVTVSSASTKGPSV |
| | | FPLAPSSKSTSGGTAALGCLVKDYFPEPVTVSWNSGALTSGV |
| | | HTFPAVLQSSGLYSLSSVVTVPSSSLGTQTYICNVNHKPSNT |
| | | KVDKKVEPKSCDKTHT |
| 78 | VH K59W (61BIT) HCDR1 | SYWMH |
| 79 | VH K59W (61BIT) HCDR2 | RIDPQSGGIWYAQKFQG |
| 80 | VH K59W (61BIT) HCDR3 | WDYGGYFDV |
| 81 | VH K59W (61BIT) VH | EVOLVQSGAEVKKPGASVKVSCKASGYTFTSYWMHWVRQAPG |
| | | QGLEWMGRIDPQSGGIWYAQKFQGRATLTVDTSTSTAYMELS |
| | | RLRSDDTAVYYCARWDYGGYFDVWGQGTLVTVSS |
| 82 | VH K59W (61BIT) Fab_HC | EVQLVQSGAEVKKPGASVKVSCKASGYTFTSYWMHWVRQAPG |
| | | QGLEWMGRIDPQSGGIWYAQKFQGRATLTVDTSTSTAYMELS |
| | | RLRSDDTAVYYCARWDYGGYFDVWGQGTLVTVSSASTKGPSV |
| | | FPLAPSSKSTSGGTAALGCLVKDYFPEPVTVSWNSGALTSGV |
| | | HTFPAVLQSSGLYSLSSVVTVPSSSLGTQTYICNVNHKPSNT |
| | | KVDKKVEPKSCDKTHT |
| 83 | VH K59Q (28BIT) HCDR1. | SYWMH |
| 84 | VH K59Q (28BIT) HCDR2 | RIDPQSGGIQYAQKFQG |
| 85 | VH K59Q (28BIT) HCDR3 | WDYGGYFDV |
| 86 | VH K59Q (28BIT) VH | EVOLVQSGAEVKKPGASVKVSCKASGYTFTSYWMHWVRQAPG |
| | | QGLEWMGRIDPQSGGIQYAQKFQGRATLTVDTSTSTAYMELS |
| | | RLRSDDTAVYYCARWDYGGYFDVWGQGTLVTVSS |
| 87 | VH K59Q (28BIT) Fab_HC | EVQLVQSGAEVKKPGASVKVSCKASGYTFTSYWMHWVRQAPG |
| | | QGLEWMGRIDPQSGGIQYAQKFQGRATLTVDTSTSTAYMELS |
| | | RLRSDDTAVYYCARWDYGGYFDVWGQGTLVTVSSASTKGPSV |
| | | FPLAPSSKSTSGGTAALGCLVKDYFPEPVTVSWNSGALTSGV |
| | | HTFPAVLQSSGLYSLSSVVTVPSSSLGTQTYICNVNHKPSNT |
| | | KVDKKVEPKSCDKTHT |
| 88 | VH G102S (29BIT) HCDR1 | SYWMH |
| 89 | VH G102S (29BIT) HCDR2 | RIDPQSGGIKYAQKFQG |
| 90 | VH G102S (29BIT) HCDR3 | WDYSGYFDV |
| 91 | VH G102S (29BIT) VH | EVQLVQSGAEVKKPGASVKVSCKASGYTFTSYWMHWVRQAPG |
| | | QGLEWMGRIDPQSGGIKYAQKFQGRATLTVDTSTSTAYMELS |
| | | RLRSDDTAVYYCARWDYSGYFDVWGQGTLVTVSS |
| 92 | VH G102S (29BIT) | EVQLVQSGAEVKKPGASVKVSCKASGYTFTSYWMHWVRQAPG |
| | Fab_HC | QGLEWMGRIDPQSGGIKYAQKFQGRATLTVDTSTSTAYMELS |
| | | RLRSDDTAVYYCARWDYSGYFDVWGQGTLVTVSSASTKGPSV |
| | | FPLAPSSKSTSGGTAALGCLVKDYFPEPVTVSWNSGALTSGV |
| | | HTFPAVLQSSGLYSLSSVVTVPSSSLGTQTYICNVNHKPSNT |
| | | KVDKKVEPKSCDKTHT |

[0793] As shown in Table 5, eleven of the sixty-five in silico design mutants exhibited at least 1.5 improvement in off-rate as compared to the humanized 20E6 Fab controls. Fold improvement in off-rate was calculated by dividing the average off-rate for the combined parental controls (i.e., 4.68×10⁻² and 3.81×10⁻²) by the mutant Fab off-rate.

TABLE 5
ForteBio off-rate screen for in silico
designed Fab mutants with human TGFβ1

| | Binding | k_{off} | Fold |
|---|---|---|---|
| Identifier | response (nm) | (×10⁻² s⁻¹) | change |
| VL R53D (35BIT) | 0.398 | 3.41 | 1.2 |
| VL R531 (34BIT) | 0.757 | 2.46 | 1.7 |
| VL R53E (31BIT) | 0.664 | 2.86 | 1.5 |
| VL T30E (36BIT) | 0.439 | 4.05 | 1 |
| VL T30D (37BIT) | 0.182 | 4.02 | 1.1 |
| VL L94D (32BIT) | 0.195 | 6.18 | 0.7 |
| VL L94Q (33BIT) | 0.341 | 5.83 | 0.7 |
| VH S31K (24BIT) | 0.625 | 3.7 | 1.1 |
| VH S31R (25BIT) | 0.069 | 4.37 | 1 |
| VH H35R (62BIT) | 0.021 | NB | NA |
| VH H35K (30BIT) | 0.115 | 5.48 | 0.8 |
| VH S55E (26BIT) | 0.489 | 5.19 | 0.8 |
| VH G57E (63BIT) | 0.69 | 3.93 | 1.1 |
| VH G57D (27BIT) | 0.582 | 3.37 | 1.3 |
| VH K59W (61BIT) | 0.035 | NB | NA |
| VH K59Q (28BIT) | 0.165 | 5.96 | 0.7 |
| VH G102S (29BIT) | 0.087 | 8.45 | 0.5 |
| 20E6 (80BGJ) | 0.253 | 4.68 | 1 |
| 20E6 (85BIT) | 0.58 | 3.81 | 1.1 |

NB: No binding observed
NA: Not applicable

### Example 5: Tyrosine Scanning for Affinity-Improved 20E6 Variants by ForteBio Interferometry

[0794] The following studies analyzed whether CDR residue substitutions by aromatic amino acids such as tyrosine, phenylalanine and tryptophan could be used to improve off-rate and thus overall binding affinity of an antibody to its cognate target antigen. Of the three, tyrosine substitutions were preferred for its lower hydrophobicity and resistance to oxidation. Thus, investigators employed a ‘tyrosine scanning’ strategy to systemically replace individual CDR residues in 20E36 antibody and identify variants that had improved binding activity to human LAP-TGFb protein. This approach more efficient than exhaustively replacing each CDR residues by all available amino acids through gene synthesis or degenerate NNK or NNS codon substitution; and is contrary to the common ‘alanine scanning’ method that is often used to identify CDR residues that when replaced by alanine results in loss of affinity and thus are important for antigen binding. It is the investigators approach that the unbiased tyrosine scanning strategy can be performed independent of structural information and may identify surprising and unexpected CDR residues that may not be obvious choices by structural studies.

[0795] Twenty-three variants containing a single tyrosine substitution in the light chain CDRs (at one of amino acid positions 24-31, 33, 34, 51-56, and 89-95 according to Kabat numbering scheme) and 21 similar heavy chain CDR variants (at amino acids positions 28-31, 33-35, 50-58 including 52a, 95, 96, 98, and 99 according to Kabat numbering scheme) were generated according to FIG. 1 and listed in Table 6 and their interactions with human LAP-TGFb1 were analyzed by ForteBio interferometry. Please note that in numerous sequences in Table 6 there are sequences listing an identifier such as the VL_X ##Y (see for example SEQ IDE NOs: 95-99 m and 105-109), which refers to the mutation being within the light chain. In those sequences the VL is correct, even though these sequences are from the heavy chain. Thus, the VL_X ##Y refers to the position of the tyrosine mutation within the antibody, regardless of whether the sequence is a heavy or light chain. As shown in Table 7, several individual tyrosine substitutions demonstrated modestly improved off-rate (1.5 to 2.6 folds over parental 20E6 Fab control).

TABLE 6
20E6 variants containing single tyrosine substitutions in selected CDR positions

| Seq | | |
|---|---|---|
| ID | Identifier | Amino acid sequence |
| 95 | VL R24Y (38BIT)_HCDR1 | SYWMH |
| 96 | VL R24Y (38BIT)_HCDR2 | RIDPQSGGIKYAQKFQG |
| 97 | VL R24Y (38BIT)_HCDR3 | WDYGGYFDV |
| 98 | VL R24Y (38BIT)_VH | EVQLVQSGAEVKKPGASVKVSCKASGYTFTSYWMHWVRQA |
| | | PGQGLEWMGRIDPQSGGIKYAQKFQGRATLTVDTSTSTAY |
| | | MELSRLRSDDTAVYYCARWDYGGYFDVWGQGTLVTVSS |
| 99 | VL R24Y (38BIT)_Fab_HC | EVQLVQSGAEVKKPGASVKVSCKASGYTFTSYWMHWVRQA |
| | | PGQGLEWMGRIDPQSGGIKYAQKFQGRATLTVDTSTSTAY |
| | | MELSRLRSDDTAVYYCARWDYGGYFDVWGQGTLVTVSSAS |
| | | TKGPSVFPLAPSSKSTSGGTAALGCLVKDYFPEPVTVSWN |
| | | SGALTSGVHTFPAVLQSSGLYSLSSVVTVPSSSLGTQTYI |
| | | CNVNHKPSNTKVDKKVEPKSCDKTHT |
| 100 | VL R24Y (38BIT)_LCDR1 | YASQDITNYLN |
| 101 | VL R24Y (38BIT)_LCDR2 | YTSRLHS |
| 102 | VL R24Y (38BIT)_LCDR3 | QQGDTLPWT |
| 103 | VL R24Y (38BIT)_VL | DIQMTQSPSSLSASVGDRVTITCYASQDITNYLNWYQQKP |
| | | GKAVKLLIYYTSRLHSGVPSRFSGSGSGTDYTLTISSLQP |
| | | EDFATYFCQQGDTLPWTFGQGTKLEIK |
| 104 | VL R24Y (38BIT)_LC | DIQMTQSPSSLSASVGDRVTITCYASQDITNYLNWYQQKP |
| | | GKAVKLLIYYTSRLHSGVPSRFSGSGSGTDYTLTISSLQP |
| | | EDFATYFCQQGDTLPWTFGQGTKLEIKRTVAAPSVFIFPP |
| | | SDEQLKSGTASVVCLLNNFYPREAKVQWKVDNALQSGNSQ |
| | | ESVTEQDSKDSTYSLSSTLTLSKADYEKHKVYACEVTHQG |
| | | LSSPVTKSENRGEC |
| 105 | VL A25Y (39BIT)_HCDR1 | SYWMH |
| 106 | VL A25Y (39BIT)_HCDR2 | RIDPQSGGIKYAQKFQG |
| 107 | VL A25Y (39BIT)_HCDR3 | WDYGGYFDV |
| 108 | VL A25Y (39BIT)_VH | EVQLVQSGAEVKKPGASVKVSCKASGYTFTSYWMHWVRQA |
| | | PGQGLEWMGRIDPQSGGIKYAQKFQGRATLTVDTSTSTAY |
| | | MELSRLRSDDTAVYYCARWDYGGYFDVWGQGTLVTVSS |
| 109 | VL A25Y (39BIT)_Fab_HC | EVQLVQSGAEVKKPGASVKVSCKASGYTFTSYWMHWVRQA |
| | | PGQGLEWMGRIDPQSGGIKYAQKFQGRATLTVDTSTSTAY |
| | | MELSRLRSDDTAVYYCARWDYGGYFDVWGQGTLVTVSSAS |
| | | TKGPSVFPLAPSSKSTSGGTAALGCLVKDYFPEPVTVSWN |
| | | SGALTSGVHTFPAVLQSSGLYSLSSVVTVPSSSLGTQTYI |
| | | CNVNHKPSNTKVDKKVEPKSCDKTHT |
| 110 | VL A25Y (39BIT)_LCDR1 | RYSQDITNYLN |
| 111 | VL A25Y (39BIT)_LCDR2 | YTSRLHS |
| 112 | VL A25Y (39BIT)_LCDR3 | QQGDTLPWT |
| 113 | VL A25Y (39BIT)_VL | DIQMTQSPSSLSASVGDRVTITCRYSQDITNYLNWYQQKP |
| | | GKAVKLLIYYTSRLHSGVPSRFSGSGSGTDYTLTISSLQP |
| | | EDFATYFCQQGDTLPWTFGQGTKLEIK |
| 114 | VL A25Y (39BIT)_LC | DIQMTQSPSSLSASVGDRVTITCRYSQDITNYLNWYQQKP |
| | | GKAVKLLIYYTSRLHSGVPSRESGSGSGTDYTLTISSLQP |
| | | EDFATYFCQQGDTLPWTFGQGTKLEIKRTVAAPSVFIFPP |
| | | SDEQLKSGTASVVCLLNNFYPREAKVQWKVDNALQSGNSQ |
| | | ESVTEQDSKDSTYSLSSTLTLSKADYEKHKVYACEVTHQG |
| | | LSSPVTKSENRGEC |
| 115 | VL S26Y (40BIT)_HCDR1 | SYWMH |
| 116 | VL S26Y (40BIT)_HCDR2 | RIDPQSGGIKYAQKFQG |
| 117 | VL S26Y (40BIT)_HCDR3 | WDYGGYFDV |
| 118 | VL S26Y (40BIT )_VH | EVQLVQSGAEVKKPGASVKVSCKASGYTFTSYWMHWVRQA |
| | | PGQGLEWMGRIDPQSGGIKYAQKFQGRATLTVDTSTSTAY |
| | | MELSRLRSDDTAVYYCARWDYGGYFDVWGQGTLVTVSS |
| 119 | VL S26Y (40BIT)_Fab_HC | EVQLVQSGAEVKKPGASVKVSCKASGYTFTSYWMHWVRQA |
| | | PGQGLEWMGRIDPQSGGIKYAQKFQGRATLTVDTSTSTAY |
| | | MELSRLRSDDTAVYYCARWDYGGYFDVWGQGTLVTVSSAS |
| | | TKGPSVFPLAPSSKSTSGGTAALGCLVKDYFPEPVTVSWN |
| | | SGALTSGVHTFPAVLQSSGLYSLSSVVTVPSSSLGTQTYI |
| | | CNVNHKPSNTKVDKKVEPKSCDKTHT |
| 120 | VL S26Y (40BIT)_LCDR1 | RAYQDITNYLN |
| 121 | VL S26Y (40BIT)_LCDR2 | YTSRLHS |
| 122 | VL S26Y (40BIT)_LCDR3 | QQGDTLPWT |
| 123 | VL S26Y (40BIT)_VL | DIQMTQSPSSLSASVGDRVTITCRAYQDITNYLNWYQQKP |
| | | GKAVKLLIYYTSRLHSGVPSRFSGSGSGTDYTLTISSLQP |
| | | EDFATYFCQQGDTLPWTFGQGTKLEIK |
| 124 | VL S26Y (40BIT)_LC | DIQMTQSPSSLSASVGDRVTITCRAYQDITNYLNWYQQKP |
| | | GKAVKLLIYYTSRLHSGVPSRFSGSGSGTDYTLTISSLQP |
| | | EDFATYFCQQGDTLPWTFGQGTKLEIKRTVAAPSVFIFPP |
| | | SDEQLKSGTASVVCLLNNFYPREAKVQWKVDNALQSGNSQ |
| | | ESVTEQDSKDSTYSLSSTLTLSKADYEKHKVYACEVTHQG |
| | | LSSPVTKSENRGEC |
| 125 | VL Q27Y (41BIT)_HCDR1 | SYWMH |
| 126 | VL Q27Y (41BIT)_HCDR2 | RIDPQSGGIKYAQKFQG |
| 127 | VL Q27Y (41BIT)_HCDR3 | WDYGGYFDV |
| 128 | VL Q27Y (41BIT)_VH | EVOLVQSGAEVKKPGASVKVSCKASGYTFTSYWMHWVRQA |
| | | PGQGLEWMGRIDPQSGGIKYAQKFQGRATLTVDTSTSTAY |
| | | MELSRLRSDDTAVYYCARWDYGGYFDVWGQGTLVTVSS |
| 129 | VL Q27Y (41BIT)_Fab_HC | EVQLVQSGAEVKKPGASVKVSCKASGYTFTSYWMHWVRQA |
| | | PGQGLEWMGRIDPQSGGIKYAQKFQGRATLTVDTSTSTAY |
| | | MELSRLRSDDTAVYYCARWDYGGYFDVWGQGTLVTVSSAS |
| | | TKGPSVFPLAPSSKSTSGGTAALGCLVKDYFPEPVTVSWN |
| | | SGALTSGVHTFPAVLQSSGLYSLSSVVTVPSSSLGTQTYI |
| | | CNVNHKPSNTKVDKKVEPKSCDKTHT |
| 130 | VL Q27Y (41BIT)_LCDR1 | RASYDITNYLN |
| 131 | VL Q27Y (41BIT)_LCDR2 | YTSRLHS |
| 132 | VL Q27Y (41BIT)_LCDR3 | QQGDTLPWT |
| 133 | VL Q27Y (41BIT)_VL | DIQMTQSPSSLSASVGDRVTITCRASYDITNYLNWYQQKP |
| | | GKAVKLLIYYTSRLHSGVPSRFSGSGSGTDYTLTISSLQP |
| | | EDFATYFCQQGDTLPWTFGQGTKLEIK |
| 134 | VL Q27Y (41BIT)_LC | DIQMTQSPSSLSASVGDRVTITCRASYDITNYLNWYQQKP |
| | | GKAVKLLIYYTSRLHSGVPSRFSGSGSGTDYTLTISSLQP |
| | | EDFATYFCQQGDTLPWTFGQGTKLEIKRTVAAPSVFIFPP |
| | | SDEQLKSGTASVVCLLNNFYPREAKVQWKVDNALQSGNSQ |
| | | ESVTEQDSKDSTYSLSSTLTLSKADYEKHKVYACEVTHQG |
| | | LSSPVTKSFNRGEC |
| 135 | VL D28Y (42BIT)_HCDR1 | SYWMH |
| 136 | VL D28Y (42BIT)_HCDR2 | RIDPQSGGIKYAQKFQG |
| 137 | VL D28Y (42BIT)_HCDR3 | WDYGGYFDV |
| 138 | VL D28Y (42BIT)_VH | EVQLVQSGAEVKKPGASVKVSCKASGYTFTSYWMHWVRQA |
| | | PGQGLEWMGRIDPQSGGIKYAQKFQGRATLTVDTSTSTAY |
| | | MELSRLRSDDTAVYYCARWDYGGYFDVWGQGTLVTVSS |
| 139 | VL D28Y (42BIT)_Fab_HC | EVQLVQSGAEVKKPGASVKVSCKASGYTFTSYWMHWVRQA |
| | | PGQGLEWMGRIDPQSGGIKYAQKFQGRATLTVDTSTSTAY |
| | | MELSRLRSDDTAVYYCARWDYGGYFDVWGQGTLVTVSSAS |
| | | TKGPSVFPLAPSSKSTSGGTAALGCLVKDYFPEPVTVSWN |
| | | SGALTSGVHTFPAVLQSSGLYSLSSVVTVPSSSLGTQTYI |
| | | CNVNHKPSNTKVDKKVEPKSCDKTHT |
| 140 | VL D28Y (42BIT)_LCDR1 | RASQYITNYLN |
| 141 | VL D28Y (42BIT)_LCDR2 | YTSRLHS |
| 142 | VL D28Y (42BIT)_LCDR3 | QQGDTLPWT |
| 143 | VL D28Y (42BIT)_VL | DIQMTQSPSSLSASVGDRVTITCRASQYITNYLNWYQQKP |
| | | GKAVKLLIYYTSRLHSGVPSRFSGSGSGTDYTLTISSLQP |
| | | EDFATYFCQQGDTLPWTFGQGTKLEIK |
| 144 | VL D28Y (42BIT)_LC | DIQMTQSPSSLSASVGDRVTITCRASQYITNYLNWYQQKP |
| | | GKAVKLLIYYTSRLHSGVPSRFSGSGSGTDYTLTISSLQP |
| | | EDFATYFCQQGDTLPWTFGQGTKLEIKRTVAAPSVFIFPP |
| | | SDEQLKSGTASVVCLLNNFYPREAKVQWKVDNALQSGNSQ |
| | | ESVTEQDSKDSTYSLSSTLTLSKADYEKHKVYACEVTHQG |
| | | LSSPVTKSENRGEC |
| 145 | VL I29Y (43BIT)_HCDR1 | SYWMH |
| 146 | VL I29Y (43BIT)_HCDR2 | RIDPQSGGIKYAQKFQG |
| 147 | VL I29Y (43BIT)_HCDR3 | WDYGGYFDV |
| 148 | VL I29Y (43BIT)_VH | EVQLVQSGAEVKKPGASVKVSCKASGYTFTSYWMHWVRQA |
| | | PGQGLEWMGRIDPQSGGIKYAQKFQGRATLTVDTSTSTAY |
| | | MELSRLRSDDTAVYYCARWDYGGYFDVWGQGTLVTVSS |
| 149 | VL I29Y (43BIT)_Fab_HC | EVOLVQSGAEVKKPGASVKVSCKASGYTFTSYWMHWVRQA |
| | | PGOGLEWMGRIDPQSGGIKYAQKFQGRATLTVDTSTSTAY |
| | | MELSRLRSDDTAVYYCARWDYGGYFDVWGQGTLVTVSSAS |
| | | TKGPSVFPLAPSSKSTSGGTAALGCLVKDYFPEPVTVSWN |
| | | SGALTSGVHTFPAVLQSSGLYSLSSVVTVPSSSLGTQTYI |
| | | CNVNHKPSNTKVDKKVEPKSCDKTHT |
| 150 | VL I29Y (43BIT)_LCDR1 | RASQDYTNYLN |
| 151 | VL I29Y (43BIT)_LCDR2 | YTSRLHS |
| 152 | VL I29Y (43BIT)_LCDR3 | QQGDTLPWT |
| 153 | VL I29Y (43BIT)_VL | DIQMTQSPSSLSASVGDRVTITCRASQDYTNYLNWYQQKP |
| | | GKAVKLLIYYTSRLHSGVPSRESGSGSGTDYTLTISSLQP |
| | | EDFATYFCQQGDTLPWTFGQGTKLEIK |
| 154 | VL I29Y (43BIT)_LC | DIQMTQSPSSLSASVGDRVTITCRASQDYTNYLNWYQQKP |
| | | GKAVKLLIYYTSRLHSGVPSRESGSGSGTDYTLTISSLQP |
| | | EDFATYFCQQGDTLPWTFGQGTKLEIKRTVAAPSVFIFPP |
| | | SDEQLKSGTASVVCLLNNFYPREAKVQWKVDNALQSGNSQ |
| | | ESVTEQDSKDSTYSLSSTLTLSKADYEKHKVYACEVTHQG |
| | | LSSPVTKSFNRGEC |
| 155 | VL T30Y (44BIT)_HCDR1 | SYWMH |
| 156 | VL T30Y (44BIT)_HCDR2 | RIDPQSGGIKYAQKFQG |
| 157 | VL T30Y (44BIT)_HCDR3 | WDYGGYFDV |
| 158 | VL T30Y (44BIT)_VH | EVQLVQSGAEVKKPGASVKVSCKASGYTFTSYWMHWVRQA |
| | | PGQGLEWMGRIDPQSGGIKYAQKFQGRATLTVDTSTSTAY |
| | | MELSRLRSDDTAVYYCARWDYGGYFDVWGQGTLVTVSS |
| 159 | VL T30Y (44BIT)_Fab_HC | EVQLVQSGAEVKKPGASVKVSCKASGYTFTSYWMHWVRQA |
| | | PGQGLEWMGRIDPQSGGIKYAQKFQGRATLTVDTSTSTAY |
| | | MELSRLRSDDTAVYYCARWDYGGYFDVWGQGTLVTVSSAS |
| | | TKGPSVFPLAPSSKSTSGGTAALGCLVKDYFPEPVTVSWN |
| | | SGALTSGVHTFPAVLQSSGLYSLSSVVTVPSSSLGTQTYI |
| | | CNVNHKPSNTKVDKKVEPKSCDKTHT |
| 160 | VL T30Y (44BIT)_LCDR1 | RASQDIYNYLN |
| 161 | VL T30Y (44BIT)_LCDR2 | YTSRLHS |
| 162 | VL T30Y (44BIT)_LCDR3 | QQGDTLPWT |
| 163 | VL T30Y (44BIT)_VL | DIQMTQSPSSLSASVGDRVTITCRASQDIYNYLNWYQQKP |
| | | GKAVKLLIYYTSRLHSGVPSRFSGSGSGTDYTLTISSLQP |
| | | EDFATYFCQQGDTLPWTFGQGTKLEIK |
| 164 | VL T30Y (44BIT)_LC | DIQMTQSPSSLSASVGDRVTITCRASQDIYNYLNWYQQKP |
| | | GKAVKLLIYYTSRLHSGVPSRESGSGSGTDYTLTISSLQP |
| | | EDFATYFCQQGDTLPWTFGQGTKLEIKRTVAAPSVFIFPP |
| | | SDEQLKSGTASVVCLLNNFYPREAKVQWKVDNALQSGNSQ |
| | | ESVTEQDSKDSTYSLSSTLTLSKADYEKHKVYACEVTHQG |
| | | LSSPVTKSFNRGEC |
| 165 | VL N31Y (45BIT)_HCDR1 | SYWMH |
| 166 | VL N31Y (45BIT)_HCDR2 | RIDPQSGGIKYAQKFQG |
| 167 | VL N31Y (45BIT)_HCDR3 | WDYGGYFDV |
| 168 | VL N31Y (45BIT)_VH | EVOLVQSGAEVKKPGASVKVSCKASGYTFTSYWMHWVRQA |
| | | PGQGLEWMGRIDPQSGGIKYAQKFQGRATLTVDTSTSTAY |
| | | MELSRLRSDDTAVYYCARWDYGGYFDVWGQGTLVTVSS |
| 169 | VL N31Y (45BIT)_Fab_HC | EVQLVQSGAEVKKPGASVKVSCKASGYTFTSYWMHWVRQA |
| | | PGQGLEWMGRIDPQSGGIKYAQKFQGRATLTVDTSTSTAY |
| | | MELSRLRSDDTAVYYCARWDYGGYFDVWGQGTLVTVSSAS |
| | | TKGPSVFPLAPSSKSTSGGTAALGCLVKDYFPEPVTVSWN |
| | | SGALTSGVHTFPAVLQSSGLYSLSSVVTVPSSSLGTQTYI |
| | | CNVNHKPSNTKVDKKVEPKSCDKTHT |
| 170 | VL N31Y (45BIT)_LCDR1 | RASQDITYYLN |
| 171 | VL N31Y | YTSRLHS |
| | (45BIT)_LCDR2 | |
| 172 | L N31Y (45BIT)_LCDR3 | QQGDTLPWT |
| 173 | VL N31Y (45BIT)_VL | DIQMTQSPSSLSASVGDRVTITCRASQDITYYLNWYQQKP |
| | | GKAVKLLIYYTSRLHSGVPSRFSGSGSGTDYTLTISSLQP |
| | | EDFATYFCQQGDTLPWTFGQGTKLEIK |
| 174 | VL N31Y (45BIT)_LC | DIQMTQSPSSLSASVGDRVTITCRASQDITYYLNWYQQKP |
| | | GKAVKLLIYYTSRLHSGVPSRESGSGSGTDYTLTISSLQP |
| | | EDFATYFCQQGDTLPWTFGQGTKLEIKRTVAAPSVFIFPP |
| | | SDEQLKSGTASVVCLLNNFYPREAKVQWKVDNALQSGNSQ |
| | | ESVTEQDSKDSTYSLSSTLTLSKADYEKHKVYACEVTHQG |
| | | LSSPVTKSFNRGEC |
| 175 | VL L33Y (46BIT)_HCDR1 | SYWMH |
| 176 | VL L33Y (46BIT)_HCDR2 | RIDPQSGGIKYAQKFQG |
| 177 | VL L33Y (46BIT)_HCDR3 | WDYGGYFDV |
| 178 | VL L33Y (46BIT)_VH | EVOLVQSGAEVKKPGASVKVSCKASGYTFTSYWMHWVRQA |
| | | PGQGLEWMGRIDPQSGGIKYAQKFQGRATLTVDTSTSTAY |
| | | MELSRLRSDDTAVYYCARWDYGGYFDVWGQGTLVTVSS |
| 179 | VL L33Y (46BIT)_Fab_HC | EVQLVQSGAEVKKPGASVKVSCKASGYTFTSYWMHWVRQA |
| | | PGQGLEWMGRIDPQSGGIKYAQKFQGRATLTVDTSTSTAY |
| | | MELSRLRSDDTAVYYCARWDYGGYFDVWGQGTLVTVSSAS |
| | | TKGPSVFPLAPSSKSTSGGTAALGCLVKDYFPEPVTVSWN |
| | | SGALTSGVHTFPAVLQSSGLYSLSSVVTVPSSSLGTQTYI |
| | | CNVNHKPSNTKVDKKVEPKSCDKTHT |
| 180 | VL L33Y (46BIT)_LCDR1 | RASQDITNYYN |
| 181 | VL L33Y (46BIT)_LCDR2 | YTSRLHS |
| 182 | VL L33Y (46BIT) | QQGDTLPWT |
| | LCDR3 | |
| 183 | VL L33Y (46BIT)_VL | DIQMTQSPSSLSASVGDRVTITCRASQDITNYYNWYQQKP |
| | | GKAVKLLIYYTSRLHSGVPSRESGSGSGTDYTLTISSLQP |
| | | EDFATYFCQQGDTLPWTFGQGTKLEIK |
| 184 | VL L33Y (46BIT)_LC | DIQMTQSPSSLSASVGDRVTITCRASQDITNYYNWYQQKP |
| | | GKAVKLLIYYTSRLHSGVPSRFSGSGSGTDYTLTISSLQP |
| | | EDFATYFCQQGDTLPWTFGQGTKLEIKRTVAAPSVFIFPP |
| | | SDEQLKSGTASVVCLLNNFYPREAKVQWKVDNALQSGNSQ |
| | | ESVTEQDSKDSTYSLSSTLTLSKADYEKHKVYACEVTHQG |
| | | LSSPVTKSENRGEC |
| 185 | VL N34Y (47BIT)_HCDR1 | SYWMH |
| 186 | VL N34Y (47BIT)_HCDR2 | RIDPQSGGIKYAQKFQG |
| 187 | VL N34Y (47BIT)_HCDR3 | WDYGGYFDV |
| 188 | VL N34Y (47BIT)_VH | EVQLVQSGAEVKKPGASVKVSCKASGYTFTSYWMHWVRQA |
| | | PGQGLEWMGRIDPQSGGIKYAQKFQGRATLTVDTSTSTAY |
| | | MELSRLRSDDTAVYYCARWDYGGYFDVWGQGTLVTVSS |
| 189 | VL N34Y (47BIT)_Fab_HC | EVQLVQSGAEVKKPGASVKVSCKASGYTFTSYWMHWVRQA |
| | | PGQGLEWMGRIDPQSGGIKYAQKFQGRATLTVDTSTSTAY |
| | | MELSRLRSDDTAVYYCARWDYGGYFDVWGQGTLVTVSSAS |
| | | TKGPSVFPLAPSSKSTSGGTAALGCLVKDYFPEPVTVSWN |
| | | SGALTSGVHTFPAVLQSSGLYSLSSVVTVPSSSLGTQTYI |
| | | CNVNHKPSNTKVDKKVEPKSCDKTHT |
| 190 | VL N34Y (47BIT)_LCDR1 | RASQDITNYLY |
| 191 | VL N34Y (47BIT)_LCDR2 | YTSRLHS |
| 192 | VL N34Y (47BIT)_LCDR3 | QQGDTLPWT |
| 193 | VL N34Y (47BIT)_VL | DIQMTQSPSSLSASVGDRVTITCRASQDITNYLYWYQQKP |
| | | GKAVKLLIYYTSRLHSGVPSRFSGSGSGTDYTLTISSLQP |
| | | EDFATYFCQQGDTLPWTFGQGTKLEIK |
| 194 | VL N34Y (47BIT)_LC | DIQMTQSPSSLSASVGDRVTITCRASQDITNYLYWYQQKP |
| | | GKAVKLLIYYTSRLHSGVPSRFSGSGSGTDYTLTISSLQP |
| | | EDFATYFCQQGDTLPWTFGQGTKLEIKRTVAAPSVFIFPP |
| | | SDEQLKSGTASVVCLLNNFYPREAKVQWKVDNALQSGNSQ |
| | | ESVTEQDSKDSTYSLSSTLTLSKADYEKHKVYACEVTHQG |
| | | LSSPVTKSENRGEC |
| 195 | VL T51Y (48BIT)_HCDR1 | SYWMH |
| 196 | VL T51Y (48BIT)_HCDR2 | RIDPQSGGIKYAQKFQG |
| 197 | VL T51Y (48BIT)_HCDR3 | WDYGGYFDV |
| 198 | VL T51Y (48BIT)_VH | EVOLVQSGAEVKKPGASVKVSCKASGYTETSYWMHWVRQA |
| | | PGQGLEWMGRIDPQSGGIKYAQKFQGRATLTVDTSTSTAY |
| | | MELSRLRSDDTAVYYCARWDYGGYFDVWGQGTLVTVSS |
| 199 | VL T51Y (48BIT)_Fab_HC | EVQLVQSGAEVKKPGASVKVSCKASGYTFTSYWMHWVRQA |
| | | PGQGLEWMGRIDPQSGGIKYAQKFQGRATLTVDTSTSTAY |
| | | MELSRLRSDDTAVYYCARWDYGGYFDVWGQGTLVTVSSAS |
| | | TKGPSVFPLAPSSKSTSGGTAALGCLVKDYFPEPVTVSWN |
| | | SGALTSGVHTFPAVLOSSGLYSLSSVVTVPSSSLGTQTYI |
| | | CNVNHKPSNTKVDKKVEPKSCDKTHT |
| 200 | VL T51Y (48BIT)_LCDR1 | RASQDITNYLN |
| 201 | VL T51Y (48BIT)_LCDR2 | YYSRLHS |
| 202 | VL T51Y (48BIT)_LCDR3 | QQGDTLPWT |
| 203 | VL T51Y (48BIT)_VL | DIQMTQSPSSLSASVGDRVTITCRASQDITNYLNWYQQKP |
| | | GKAVKLLIYYYSRLHSGVPSRFSGSGSGTDYTLTISSLQP |
| | | EDFATYFCQQGDTLPWTFGQGTKLEIK |
| 204 | VL T51Y (48BIT)_LC | DIQMTQSPSSLSASVGDRVTITCRASQDITNYLNWYQQKP |
| | | GKAVKLLIYYYSRLHSGVPSRESGSGSGTDYTLTISSLQP |
| | | EDFATYFCQQGDTLPWTFGQGTKLEIKRTVAAPSVFIFPP |
| | | SDEQLKSGTASVVCLLNNFYPREAKVQWKVDNALQSGNSQ |
| | | ESVTEQDSKDSTYSLSSTLTLSKADYEKHKVYACEVTHQG |
| | | LSSPVTKSFNRGEC |
| 205 | VL S52Y (49BIT)_HCDR1 | SYWMH |
| 206 | VL S52Y (49BIT)_HCDR2 | RIDPQSGGIKYAQKFQG |
| 207 | VL S52Y (49BIT)_HCDR3 | WDYGGYFDV |
| 208 | VL S52Y (49BIT)_VH | EVQLVQSGAEVKKPGASVKVSCKASGYTFTSYWMHWVRQA |
| | | PGQGLEWMGRIDPQSGGIKYAQKFQGRATLTVDTSTSTAY |
| | | MELSRLRSDDTAVYYCARWDYGGYFDVWGQGTLVTVSS |
| 209 | VL S52Y (49BIT)_Fab_HC | EVQLVQSGAEVKKPGASVKVSCKASGYTFTSYWMHWVRQA |
| | | PGQGLEWMGRIDPQSGGIKYAQKFQGRATLTVDTSTSTAY |
| | | MELSRLRSDDTAVYYCARWDYGGYFDVWGQGTLVTVSSAS |
| | | TKGPSVFPLAPSSKSTSGGTAALGCLVKDYFPEPVTVSWN |
| | | SGALTSGVHTFPAVLQSSGLYSLSSVVTVPSSSLGTQTYI |
| | | CNVNHKPSNTKVDKKVEPKSCDKTHT |
| 210 | VL S52Y (49BIT)_LCDR1 | RASQDITNYLN |
| 211 | VL S52Y (49BIT)_LCDR2 | YTYRLHS |
| 212 | VL S52Y (49BIT)_LCDR3 | QQGDTLPWT |
| 213 | VL S52Y (49BIT)_VL | DIQMTQSPSSLSASVGDRVTITCRASQDITNYLNWYQQKP |
| | | GKAVKLLIYYTYRLHSGVPSRESGSGSGTDYTLTISSLQP |
| | | EDFATYFCQQGDTLPWTFGQGTKLEIK |
| 214 | VL S52Y (49BIT)_LC | DIQMTQSPSSLSASVGDRVTITCRASQDITNYLNWYQQKP |
| | | GKAVKLLIYYTYRLHSGVPSRFSGSGSGTDYTLTISSLQP |
| | | EDFATYFCQQGDTLPWTFGQGTKLEIKRTVAAPSVFIFPP |
| | | SDEQLKSGTASVVCLLNNFYPREAKVQWKVDNALQSGNSQ |
| | | ESVTEQDSKDSTYSLSSTLTLSKADYEKHKVYACEVTHQG |
| | | LSSPVTKSFNRGEC |
| 215 | VL R53Y (50BIT)_HCDR1 | SYWMH |
| 216 | VL R53Y (50BIT)_HCDR2 | RIDPQSGGIKYAQKFQG |
| 217 | VL R53Y (50BIT)_HCDR3 | WDYGGYFDV |
| 218 | VL R53Y (50BIT)_VH | EVQLVQSGAEVKKPGASVKVSCKASGYTFTSYWMHWVRQA |
| | | PGQGLEWMGRIDPQSGGIKYAQKFQGRATLTVDTSTSTAY |
| | | MELSRLRSDDTAVYYCARWDYGGYFDVWGQGTLVTVSS |
| 219 | VL R53Y (50BIT)_Fab_HC | EVQLVQSGAEVKKPGASVKVSCKASGYTFTSYWMHWVRQA |
| | | PGQGLEWMGRIDPQSGGIKYAQKFQGRATLTVDTSTSTAY |
| | | MELSRLRSDDTAVYYCARWDYGGYFDVWGQGTLVTVSSAS |
| | | TKGPSVFPLAPSSKSTSGGTAALGCLVKDYFPEPVTVSWN |
| | | SGALTSGVHTFPAVLQSSGLYSLSSVVTVPSSSLGTQTYI |
| | | CNVNHKPSNTKVDKKVEPKSCDKTHT |
| 220 | VL R53Y (50BIT)_LCDR1 | RASQDITNYLN |
| 221 | VL R53Y (50BIT)_LCDR2 | YTSYLHS |
| 222 | VL R53Y (50BIT)_LCDR3 | QQGDTLPWT |
| 223 | VL R53Y (50BIT)_VL | DIQMTQSPSSLSASVGDRVTITCRASQDITNYLNWYQQKP |
| | | GKAVKLLIYYTSYLHSGVPSRFSGSGSGTDYTLTISSLQP |
| | | EDFATYFCQQGDTLPWTFGQGTKLEIK |
| 224 | VL R53Y (50BIT)_LC | DIQMTQSPSSLSASVGDRVTITCRASQDITNYLNWYQQKP |
| | | GKAVKLLIYYTSYLHSGVPSRFSGSGSGTDYTLTISSLQP |
| | | EDFATYFCQQGDTLPWTFGQGTKLEIKRTVAAPSVFIFPP |
| | | SDEQLKSGTASVVCLLNNFYPREAKVQWKVDNALQSGNSQ |
| | | ESVTEQDSKDSTYSLSSTLTLSKADYEKHKVYACEVTHQG |
| | | LSSPVTKSENRGEC |
| 225 | VL L54Y (51BIT)_HCDR1 | SYWMH |
| 226 | VL L54Y (51BIT)_HCDR2 | RIDPQSGGIKYAQKFQG |
| 227 | VL L54Y (51BIT)_HCDR3 | WDYGGYFDV |
| 228 | VL L54Y (51BIT)_VH | EVOLVQSGAEVKKPGASVKVSCKASGYTFTSYWMHWVRQA |
| | | PGQGLEWMGRIDPQSGGIKYAQKFQGRATLTVDTSTSTAY |
| | | MELSRLRSDDTAVYYCARWDYGGYFDVWGQGTLVTVSS |
| 229 | VL L54Y (51BIT)_Fab_HC | EVQLVQSGAEVKKPGASVKVSCKASGYTFTSYWMHWVRQA |
| | | PGQGLEWMGRIDPQSGGIKYAQKFQGRATLTVDTSTSTAY |
| | | MELSRLRSDDTAVYYCARWDYGGYFDVWGQGTLVTVSSAS |
| | | TKGPSVFPLAPSSKSTSGGTAALGCLVKDYFPEPVTVSWN |
| | | SGALTSGVHTFPAVLQSSGLYSLSSVVTVPSSSLGTQTYI |
| | | CNVNHKPSNTKVDKKVEPKSCDKTHT |
| 230 | VL L54Y (51BIT)_LCDR1 | RASQDITNYLN |
| 231 | VL L54Y (51BIT)_LCDR2 | YTSRYHS |
| 232 | VL L54Y (51BIT)_LCDR3 | QQGDTLPWT |
| 233 | VL L54Y (51BIT)_VL | DIQMTQSPSSLSASVGDRVTITCRASQDITNYLNWYQQKP |
| | | GKAVKLLIYYTSRYHSGVPSRFSGSGSGTDYTLTISSLQP |
| | | EDFATYFCQQGDTLPWTFGQGTKLEIK |
| 234 | VL L54Y (51BIT)_LC | DIQMTQSPSSLSASVGDRVTITCRASQDITNYLNWYQQKP |
| | | GKAVKLLIYYTSRYHSGVPSRFSGSGSGTDYTLTISSLQP |
| | | EDFATYFCQQGDTLPWTFGQGTKLEIKRTVAAPSVFIFPP |
| | | SDEQLKSGTASVVCLLNNFYPREAKVOWKVDNALQSGNSQ |
| | | ESVTEQDSKDSTYSLSSTLTLSKADYEKHKVYACEVTHQG |
| | | LSSPVTKSFNRGEC |
| 235 | VL H55Y (52BIT)_HCDR1 | SYWMH |
| 236 | VL H55Y (52BIT)_HCDR2 | RIDPQSGGIKYAQKFQG |
| 237 | VL H55Y (52BIT)_HCDR3 | WDYGGYFDV |
| 238 | VL H55Y (52BIT)_VH | EVOLVQSGAEVKKPGASVKVSCKASGYTFTSYWMHWVRQA |
| | | PGQGLEWMGRIDPQSGGIKYAQKFQGRATLTVDTSTSTAY |
| | | MELSRLRSDDTAVYYCARWDYGGYFDVWGQGTLVTVSS |
| 239 | VL H55Y (52BIT)_Fab_HC | EVQLVQSGAEVKKPGASVKVSCKASGYTFTSYWMHWVRQA |
| | | PGQGLEWMGRIDPQSGGIKYAQKFQGRATLTVDTSTSTAY |
| | | MELSRLRSDDTAVYYCARWDYGGYFDVWGQGTLVTVSSAS |
| | | TKGPSVFPLAPSSKSTSGGTAALGCLVKDYFPEPVTVSWN |
| | | SGALTSGVHTFPAVLQSSGLYSLSSVVTVPSSSLGTQTYI |
| | | CNVNHKPSNTKVDKKVEPKSCDKTHT |
| 240 | VL H55Y (52BIT)_LCDR1 | RASQDITNYLN |
| 241 | VL H55Y (52BIT)_LCDR2 | YTSRLYS |
| 242 | VL H55Y (52BIT)_LCDR3 | QQGDTLPWT |
| 243 | VL H55Y (52BIT)_VL | DIQMTQSPSSLSASVGDRVTITCRASQDITNYLNWYQQKP |
| | | GKAVKLLIYYTSRLYSGVPSRFSGSGSGTDYTLTISSLQP |
| | | EDFATYFCQQGDTLPWTFGQGTKLEIK |
| 244 | VL H55Y (52BIT)_LC | DIQMTQSPSSLSASVGDRVTITCRASQDITNYLNWYQQKP |
| | | GKAVKLLIYYTSRLYSGVPSRFSGSGSGTDYTLTISSLQP |
| | | EDFATYFCQQGDTLPWTFGQGTKLEIKRTVAAPSVFIFPP |
| | | SDEQLKSGTASVVCLLNNFYPREAKVQWKVDNALQSGNSQ |
| | | ESVTEQDSKDSTYSLSSTLTLSKADYEKHKVYACEVTHQG |
| | | LSSPVTKSFNRGEC |
| 245 | VL S56Y (53BIT)_HCDR1 | SYWMH |
| 246 | VL S56Y (53BIT)_HCDR2 | RIDPQSGGIKYAQKFQG |
| 247 | VL S56Y (53BIT)_HCDR3 | WDYGGYFDV |
| 248 | VL S56Y (53BIT)_VH | EVQLVQSGAEVKKPGASVKVSCKASGYTFTSYWMHWVRQA |
| | | PGQGLEWMGRIDPQSGGIKYAQKFQGRATLTVDTSTSTAY |
| | | MELSRLRSDDTAVYYCARWDYGGYFDVWGQGTLVTVSS |
| 249 | VL S56Y (53BIT)_Fab_HC | EVQLVQSGAEVKKPGASVKVSCKASGYTFTSYWMHWVRQA |
| | | PGQGLEWMGRIDPQSGGIKYAQKFQGRATLTVDTSTSTAY |
| | | MELSRLRSDDTAVYYCARWDYGGYFDVWGQGTLVTVSSAS |
| | | TKGPSVFPLAPSSKSTSGGTAALGCLVKDYFPEPVTVSWN |
| | | SGALTSGVHTFPAVLQSSGLYSLSSVVTVPSSSLGTQTYI |
| | | CNVNHKPSNTKVDKKVEPKSCDKTHT |
| 250 | VL S56Y (53BIT)_LCDR1 | RASQDITNYLN |
| 251 | VL S56Y (53BIT)_LCDR2 | YTSRLHY |
| 252 | VL S56Y (53BIT)_LCDR3 | QQGDTLPWT |
| 253 | VL S56Y (53BIT)_VL | DIQMTQSPSSLSASVGDRVTITCRASQDITNYLNWYQQKP |
| | | GKAVKLLIYYTSRLHYGVPSRFSGSGSGTDYTLTISSLQP |
| | | EDFATYFCQQGDTLPWTFGQGTKLEIK |
| 254 | VL S56Y (53BIT)_LC | DIQMTQSPSSLSASVGDRVTITCRASQDITNYLNWYQQKP |
| | | GKAVKLLIYYTSRLHYGVPSRESGSGSGTDYTLTISSLQP |
| | | EDFATYFCQQGDTLPWTFGQGTKLEIKRTVAAPSVFIFPP |
| | | SDEQLKSGTASVVCLLNNFYPREAKVQWKVDNALQSGNSQ |
| | | ESVTEQDSKDSTYSLSSTLTLSKADYEKHKVYACEVTHQG |
| | | LSSPVTKSENRGEC |
| 255 | VL Q89Y (54BIT)_HCDR1 | SYWMH |
| 256 | VL Q89Y (54BIT)_HCDR2 | RIDPQSGGIKYAQKFQG |
| 257 | VL Q89Y (54BIT)_HCDR3 | WDYGGYFDV |
| 258 | VL Q89Y (54BIT)_VH | EVQLVQSGAEVKKPGASVKVSCKASGYTFTSYWMHWVRQA |
| | | PGQGLEWMGRIDPQSGGIKYAQKFQGRATLTVDTSTSTAY |
| | | MELSRLRSDDTAVYYCARWDYGGYFDVWGQGTLVTVSS |
| 259 | VL Q89Y (54BIT)_Fab_HC | EVQLVQSGAEVKKPGASVKVSCKASGYTFTSYWMHWVRQA |
| | | PGQGLEWMGRIDPQSGGIKYAQKFQGRATLTVDTSTSTAY |
| | | MELSRLRSDDTAVYYCARWDYGGYFDVWGQGTLVTVSSAS |
| | | TKGPSVFPLAPSSKSTSGGTAALGCLVKDYFPEPVTVSWN |
| | | SGALTSGVHTFPAVLQSSGLYSLSSVVTVPSSSLGTQTYI |
| | | CNVNHKPSNTKVDKKVEPKSCDKTHT |
| 260 | VL Q89Y (54BIT)_LCDR1 | RASQDITNYLN |
| 261 | VL Q89Y (54BIT)_LCDR2 | YTSRLHS |
| 262 | VL Q89Y (54BIT)_LCDR3 | YQGDTLPWT |
| 263 | VL Q89Y (54BIT)_VL | DIQMTQSPSSLSASVGDRVTITCRASQDITNYLNWYQQKP |
| | | GKAVKLLIYYTSRLHSGVPSRFSGSGSGTDYTLTISSLQP |
| | | EDFATYFCYQGDTLPWTFGQGTKLEIK |
| 264 | VL Q89Y (54BIT)_LC | DIQMTQSPSSLSASVGDRVTITCRASQDITNYLNWYQQKP |
| | | GKAVKLLIYYTSRLHSGVPSRFSGSGSGTDYTLTISSLQP |
| | | EDFATYFCYQGDTLPWTFGQGTKLEIKRTVAAPSVFIFPP |
| | | SDEQLKSGTASVVCLLNNFYPREAKVQWKVDNALQSGNSQ |
| | | ESVTEQDSKDSTYSLSSTLTLSKADYEKHKVYACEVTHQG |
| | | LSSPVTKSFNRGEC |
| 265 | VL Q90Y (55BIT)_HCDR1 | SYWMH |
| 266 | VL Q90Y (55BIT)_HCDR2 | RIDPQSGGIKYAQKFQG |
| 267 | VL Q90Y (55BIT)_HCDR3 | WDYGGYFDV |
| 268 | VL Q90Y (55BIT)_VH | EVOLVQSGAEVKKPGASVKVSCKASGYTFTSYWMHWVRQA |
| | | PGQGLEWMGRIDPQSGGIKYAQKFQGRATLTVDTSTSTAY |
| | | MELSRLRSDDTAVYYCARWDYGGYFDVWGQGTLVTVSS |
| 269 | VL Q90Y (55BIT)_Fab_HC | EVQLVQSGAEVKKPGASVKVSCKASGYTFTSYWMHWVRQA |
| | | PGQGLEWMGRIDPQSGGIKYAQKFQGRATLTVDTSTSTAY |
| | | MELSRLRSDDTAVYYCARWDYGGYFDVWGQGTLVTVSSAS |
| | | TKGPSVFPLAPSSKSTSGGTAALGCLVKDYFPEPVTVSWN |
| | | SGALTSGVHTFPAVLQSSGLYSLSSVVTVPSSSLGTQTYI |
| | | CNVNHKPSNTKVDKKVEPKSCDKTHT |
| 270 | VL Q90Y (55BIT)_LCDR1 | RASQDITNYLN |
| 271 | VL Q90Y (55BIT)_LCDR2 | YTSRLHS |
| 272 | VL Q90Y (55BIT)_LCDR3 | QYGDTLPWT |
| 273 | VL Q90Y (55BIT)_VL | DIQMTQSPSSLSASVGDRVTITCRASQDITNYLNWYQQKP |
| | | GKAVKLLIYYTSRLHSGVPSRFSGSGSGTDYTLTISSLQP |
| | | EDFATYFCQYGDTLPWTFGQGTKLEIK |
| 274 | VL Q90Y (55BIT)_LC | DIQMTQSPSSLSASVGDRVTITCRASQDITNYLNWYQQKP |
| | | GKAVKLLIYYTSRLHSGVPSRFSGSGSGTDYTLTISSLQP |
| | | EDFATYFCQYGDTLPWTFGQGTKLEIKRTVAAPSVFIFPP |
| | | SDEQLKSGTASVVCLLNNFYPREAKVQWKVDNALQSGNSQ |
| | | ESVTEQDSKDSTYSLSSTLTLSKADYEKHKVYACEVTHQG |
| | | LSSPVTKSFNRGEC |
| 275 | VL G91Y (56BIT)_HCDR1 | SYWMH |
| 276 | VL G91Y (56BIT)_HCDR2 | RIDPQSGGIKYAQKFQG |
| 277 | VL G91Y (56BIT)_HCDR3 | WDYGGYFDV |
| 278 | VL G91Y (56BIT)_VH | EVOLVQSGAEVKKPGASVKVSCKASGYTFTSYWMHWVRQA |
| | | PGQGLEWMGRIDPQSGGIKYAQKFQGRATLTVDTSTSTAY |
| | | MELSRLRSDDTAVYYCARWDYGGYFDVWGQGTLVTVSS |
| 279 | VL G91Y (56BIT)_Fab_HC | EVQLVQSGAEVKKPGASVKVSCKASGYTFTSYWMHWVRQA |
| | | PGQGLEWMGRIDPQSGGIKYAQKFQGRATLTVDTSTSTAY |
| | | MELSRLRSDDTAVYYCARWDYGGYFDVWGQGTLVTVSSAS |
| | | TKGPSVFPLAPSSKSTSGGTAALGCLVKDYFPEPVTVSWN |
| | | SGALTSGVHTFPAVLQSSGLYSLSSVVTVPSSSLGTQTYI |
| | | CNVNHKPSNTKVDKKVEPKSCDKTHT |
| 280 | VL G91Y (56BIT)_LCDR1 | RASQDITNYLN |
| 281 | VL G91Y (56BIT)_LCDR2 | YTSRLHS |
| 282 | VL G91Y (56BIT)_LCDR3 | QQYDTLPWT |
| 283 | VL G91Y (56BIT)_VL | DIQMTQSPSSLSASVGDRVTITCRASQDITNYLNWYQQKP |
| | | GKAVKLLIYYTSRLHSGVPSRFSGSGSGTDYTLTISSLQP |
| | | EDFATYFCQQYDTLPWTFGQGTKLEIK |
| 284 | VL G91Y (56BIT)_LC | DIQMTQSPSSLSASVGDRVTITCRASQDITNYLNWYQQKP |
| | | GKAVKLLIYYTSRLHSGVPSRESGSGSGTDYTLTISSLQP |
| | | EDFATYFCQQYDTLPWTFGQGTKLEIKRTVAAPSVFIFPP |
| | | SDEQLKSGTASVVCLLNNFYPREAKVQWKVDNALQSGNSQ |
| | | ESVTEQDSKDSTYSLSSTLTLSKADYEKHKVYACEVTHQG |
| | | LSSPVTKSENRGEC |
| 285 | VL D92Y (57BIT)_HCDR1 | SYWMH |
| 286 | VL D92Y (57BIT)_HCDR2 | RIDPQSGGIKYAQKFQG |
| 287 | VL D92Y (57BIT)_HCDR3 | WDYGGYFDV |
| 288 | VL D92Y (57BIT)_VH | EVOLVQSGAEVKKPGASVKVSCKASGYTETSYWMHWVRQA |
| | | PGQGLEWMGRIDPQSGGIKYAQKFQGRATLTVDTSTSTAY |
| | | MELSRLRSDDTAVYYCARWDYGGYFDVWGQGTLVTVSS |
| 289 | VL D92Y (57BIT)_Fab_HC | EVQLVQSGAEVKKPGASVKVSCKASGYTFTSYWMHWVRQA |
| | | PGQGLEWMGRIDPQSGGIKYAQKFQGRATLTVDTSTSTAY |
| | | MELSRLRSDDTAVYYCARWDYGGYFDVWGQGTLVTVSSAS |
| | | TKGPSVFPLAPSSKSTSGGTAALGCLVKDYFPEPVTVSWN |
| | | SGALTSGVHTFPAVLQSSGLYSLSSVVTVPSSSLGTQTYI |
| | | CNVNHKPSNTKVDKKVEPKSCDKTHT |
| 290 | VL D92Y (57BIT)_LCDR1 | RASQDITNYLN |
| 291 | VL D92Y (57BIT)_LCDR2 | YTSRLHS |
| 292 | VL D92Y (57BIT)_LCDR3 | QQGYTLPWT |
| 293 | VL D92Y (57BIT)_VL | DIQMTQSPSSLSASVGDRVTITCRASQDITNYLNWYQQKP |
| | | GKAVKLLIYYTSRLHSGVPSRFSGSGSGTDYTLTISSLQP |
| | | EDFATYFCQQGYTLPWTFGQGTKLEIK |
| 294 | VL D92Y (57BIT)_LC | DIQMTQSPSSLSASVGDRVTITCRASQDITNYLNWYQQKP |
| | | GKAVKLLIYYTSRLHSGVPSRFSGSGSGTDYTLTISSLQP |
| | | EDFATYFCQQGYTLPWTFGQGTKLEIKRTVAAPSVFIFPP |
| | | SDEQLKSGTASVVCLLNNFYPREAKVQWKVDNALQSGNSQ |
| | | ESVTEQDSKDSTYSLSSTLTLSKADYEKHKVYACEVTHQG |
| | | LSSPVTKSFNRGEC |
| 295 | VL T93Y (58BIT)_HCDR1 | SYWMH |
| 296 | VL T93Y (58BIT)_HCDR2 | RIDPQSGGIKYAQKFQG |
| 297 | VL T93Y | WDYGGYFDV |
| | (58BIT)_HCDR3 | |
| 298 | VL T93Y (58BIT)_VH | EVQLVQSGAEVKKPGASVKVSCKASGYTFTSYWMHWVRQA |
| | | PGQGLEWMGRIDPQSGGIKYAQKFQGRATLTVDTSTSTAY |
| | | MELSRLRSDDTAVYYCARWDYGGYFDVWGQGTLVTVSS |
| 299 | VL T93Y (58BIT )_Fab_HC | EVOLVQSGAEVKKPGASVKVSCKASGYTFTSYWMHWVRQA |
| | | PGQGLEWMGRIDPQSGGIKYAQKFQGRATLTVDTSTSTAY |
| | | MELSRLRSDDTAVYYCARWDYGGYFDVWGQGTLVTVSSAS |
| | | TKGPSVFPLAPSSKSTSGGTAALGCLVKDYFPEPVTVSWN |
| | | SGALTSGVHTFPAVLQSSGLYSLSSVVTVPSSSLGTQTYI |
| | | CNVNHKPSNTKVDKKVEPKSCDKTHT |
| 300 | VL T93Y (58BIT)_LCDR1 | RASQDITNYLN |
| 301 | VL T93Y (58BIT)_LCDR2 | YTSRLHS |
| 302 | VL T93Y (58BIT)_LCDR3 | QQGDYLPWT |
| 303 | VL T93Y (58BIT)_VL | DIQMTQSPSSLSASVGDRVTITCRASQDITNYLNWYQQKP |
| | | GKAVKLLIYYTSRLHSGVPSRESGSGSGTDYTLTISSLQP |
| | | EDFATYFCQQGDYLPWTFGQGTKLEIK |
| 304 | VL T93Y (58BIT)_LC | DIQMTQSPSSLSASVGDRVTITCRASQDITNYLNWYQQKP |
| | | GKAVKLLIYYTSRLHSGVPSRFSGSGSGTDYTLTISSLQP |
| | | EDFATYFCQQGDYLPWTFGQGTKLEIKRTVAAPSVFIFPP |
| | | SDEQLKSGTASVVCLLNNFYPREAKVQWKVDNALQSGNSQ |
| | | ESVTEQDSKDSTYSLSSTLTLSKADYEKHKVYACEVTHQG |
| | | LSSPVTKSFNRGEC |
| 305 | VL L94Y (59BIT)_HCDR1 | SYWMH |
| 306 | VL L94Y (59BIT)_HCDR2 | RIDPQSGGIKYAQKFQG |
| 307 | VL L94Y (59BIT)_HCDR3 | WDYGGYFDV |
| 308 | VL L94Y (59BIT)_VH | EVQLVQSGAEVKKPGASVKVSCKASGYTFTSYWMHWVRQA |
| | | PGQGLEWMGRIDPQSGGIKYAQKFQGRATLTVDTSTSTAY |
| | | MELSRLRSDDTAVYYCARWDYGGYFDVWGQGTLVTVSS |
| 309 | VL L94Y (59BIT)_Fab_HC | EVQLVQSGAEVKKPGASVKVSCKASGYTFTSYWMHWVRQA |
| | | PGQGLEWMGRIDPQSGGIKYAQKFQGRATLTVDTSTSTAY |
| | | MELSRLRSDDTAVYYCARWDYGGYFDVWGQGTLVTVSSAS |
| | | TKGPSVFPLAPSSKSTSGGTAALGCLVKDYFPEPVTVSWN |
| | | SGALTSGVHTFPAVLQSSGLYSLSSVVTVPSSSLGTQTYI |
| | | CNVNHKPSNTKVDKKVEPKSCDKTHT |
| 310 | VL L94Y (59BIT)_LCDR1 | RASQDITNYLN |
| 311 | VL L94Y (59BIT)_LCDR2 | YTSRLHS |
| 312 | VL L94Y (59BIT)_LCDR3 | QQGDTYPWT |
| 313 | VL L94Y (59BIT)_VL | DIQMTQSPSSLSASVGDRVTITCRASQDITNYLNWYQQKP |
| | | GKAVKLLIYYTSRLHSGVPSRFSGSGSGTDYTLTISSLQP |
| | | EDFATYFCQQGDTYPWTFGQGTKLEIK |
| 314 | VL L94Y (59BIT)_LC | DIQMTQSPSSLSASVGDRVTITCRASQDITNYLNWYQQKP |
| | | GKAVKLLIYYTSRLHSGVPSRFSGSGSGTDYTLTISSLQP |
| | | EDFATYFCQQGDTYPWTFGQGTKLEIKRTVAAPSVFIFPP |
| | | SDEQLKSGTASVVCLLNNFYPREAKVQWKVDNALQSGNSQ |
| | | ESVTEQDSKDSTYSLSSTLTLSKADYEKHKVYACEVTHQG |
| | | LSSPVTKSENRGEC |
| 315 | VL P95Y (60BIT)_HCDR1 | SYWMH |
| 316 | VL P95Y (60BIT)_HCDR2 | RIDPQSGGIKYAQKFQG |
| 317 | VL P95Y (60BIT)_HCDR3 | WDYGGYFDV |
| 318 | VL P95Y (60BIT)_VH | EVQLVQSGAEVKKPGASVKVSCKASGYTETSYWMHWVRQA |
| | | PGQGLEWMGRIDPQSGGIKYAQKFQGRATLTVDTSTSTAY |
| | | MELSRLRSDDTAVYYCARWDYGGYFDVWGQGTLVTVSS |
| 319 | VL P95Y (60BIT)_Fab_HC | EVQLVQSGAEVKKPGASVKVSCKASGYTFTSYWMHWVRQA |
| | | PGQGLEWMGRIDPQSGGIKYAQKFQGRATLTVDTSTSTAY |
| | | MELSRLRSDDTAVYYCARWDYGGYFDVWGQGTLVTVSSAS |
| | | TKGPSVFPLAPSSKSTSGGTAALGCLVKDYFPEPVTVSWN |
| | | SGALTSGVHTFPAVLQSSGLYSLSSVVTVPSSSLGTQTYI |
| | | CNVNHKPSNTKVDKKVEPKSCDKTHT |
| 320 | VL P95Y (60BIT)_LCDR1 | RASQDITNYLN |
| 321 | VL P95Y (60BIT)_LCDR2 | YTSRLHS |
| 322 | VL P95Y (60BIT)_LCDR3 | QQGDTLYWT |
| 323 | VL P95Y (60BIT)_VL | DIQMTQSPSSLSASVGDRVTITCRASQDITNYLNWYQQKP |
| | | GKAVKLLIYYTSRLHSGVPSRFSGSGSGTDYTLTISSLQP |
| | | EDFATYFCQQGDTLYWTFGQGTKLEIK |
| 324 | VL P95Y (60BIT)_LC | DIQMTQSPSSLSASVGDRVTITCRASQDITNYLNWYQQKP |
| | | GKAVKLLIYYTSRLHSGVPSRESGSGSGTDYTLTISSLQP |
| | | EDFATYFCQQGDTLYWTFGQGTKLEIKRTVAAPSVFIFPP |
| | | SDEQLKSGTASVVCLLNNFYPREAKVQWKVDNALQSGNSQ |
| | | ESVTEQDSKDSTYSLSSTLTLSKADYEKHKVYACEVTHQG |
| | | LSSPVTKSFNRGEC |
| 325 | VH T28Y (67BIT)_HCDR1 | SYWMH |
| 326 | VH T28Y (67BIT)_HCDR2 | RIDPQSGGIKYAQKFQG |
| 327 | VH T28Y (67BIT)_HCDR3 | WDYGGYFDV |
| 328 | VH T28Y (67BIT)_VH | EVOLVQSGAEVKKPGASVKVSCKASGYYFTSYWMHWVRQA |
| | | PGQGLEWMGRIDPQSGGIKYAQKFQGRATLTVDTSTSTAY |
| | | MELSRLRSDDTAVYYCARWDYGGYFDVWGQGTLVTVSS |
| 329 | VH T28Y (67BIT)_Fab_HC | EVQLVQSGAEVKKPGASVKVSCKASGYYFTSYWMHWVRQA |
| | | PGQGLEWMGRIDPQSGGIKYAQKFQGRATLTVDTSTSTAY |
| | | MELSRLRSDDTAVYYCARWDYGGYFDVWGQGTLVTVSSAS |
| | | TKGPSVFPLAPSSKSTSGGTAALGCLVKDYFPEPVTVSWN |
| | | SGALTSGVHTFPAVLQSSGLYSLSSVVTVPSSSLGTQTYI |
| | | CNVNHKPSNTKVDKKVEPKSCDKTHT |
| 330 | VH T28Y (67BIT)_LCDR1 | RASQDITNYLN |
| 331 | VH T28Y (67BIT)_LCDR2 | YTSRLHS |
| 332 | VH T28Y (67BIT)_LCDR3 | QQGDTLPWT |
| 333 | VH T28Y (67BIT)_VL | DIQMTQSPSSLSASVGDRVTITCRASQDITNYLNWYQQKP |
| | | GKAVKLLIYYTSRLHSGVPSRESGSGSGTDYTLTISSLQP |
| | | EDFATYFCQQGDTLPWTFGQGTKLEIK |
| 334 | VH T28Y (67BIT)_LC | DIQMTQSPSSLSASVGDRVTITCRASQDITNYLNWYQQKP |
| | | GKAVKLLIYYTSRLHSGVPSRFSGSGSGTDYTLTISSLQP |
| | | EDFATYFCQQGDTLPWTFGQGTKLEIKRTVAAPSVFIFPP |
| | | SDEQLKSGTASVVCLLNNFYPREAKVQWKVDNALQSGNSQ |
| | | ESVTEQDSKDSTYSLSSTLTLSKADYEKHKVYACEVTHQG |
| | | LSSPVTKSFNRGEC |
| 335 | VH F29Y (68BIT)_HCDR1 | SYWMH |
| 336 | VH F29Y (68BIT)_HCDR2 | RIDPQSGGIKYAQKFQG |
| 337 | VH F29Y (68BIT)_HCDR3 | WDYGGYFDV |
| 338 | VH F29Y (68BIT)_VH | EVOLVQSGAEVKKPGASVKVSCKASGYTYTSYWMHWVRQA |
| | | PGQGLEWMGRIDPQSGGIKYAQKFQGRATLTVDTSTSTAY |
| | | MELSRLRSDDTAVYYCARWDYGGYFDVWGQGTLVTVSS |
| 339 | VH F29Y (68BIT)_Fab_HC | EVQLVQSGAEVKKPGASVKVSCKASGYTYTSYWMHWVRQA |
| | | PGQGLEWMGRIDPQSGGIKYAQKFQGRATLTVDTSTSTAY |
| | | MELSRLRSDDTAVYYCARWDYGGYFDVWGQGTLVTVSSAS |
| | | TKGPSVFPLAPSSKSTSGGTAALGCLVKDYFPEPVTVSWN |
| | | SGALTSGVHTFPAVHQSSGLYSLSSVVTVPSSSLGTQTYI |
| | | CNVNHKPSNTKVDKKVEPKSCDKTHT |
| 340 | VH F29Y (68BIT)_LCDR1 | RASQDITNYLN |
| 341 | VH F29Y (68BIT)_LCDR2 | YTSRLHS |
| 342 | VH F29Y (68BIT)_LCDR3 | QQGDTLPWT |
| 343 | VH F29Y (68BIT)_VL | DIQMTQSPSSLSASVGDRVTITCRASQDITNYLNWYQQKP |
| | | GKAVKLLIYYTSRLHSGVPSRFSGSGSGTDYTLTISSLQP |
| | | EDFATYFCQQGDTLPWTFGQGTKLEIK |
| 344 | VH F29Y (68BIT)_LC | DIQMTQSPSSLSASVGDRVTITCRASQDITNYLNWYQQKP |
| | | GKAVKLLIYYTSRLHSGVPSRESGSGSGTDYTLTISSLQP |
| | | EDFATYFCQQGDTLPWTFGQGTKLEIKRTVAAPSVFIFPP |
| | | SDEQLKSGTASVVCLLNNFYPREAKVQWKVDNALQSGNSQ |
| | | ESVTEQDSKDSTYSLSSTLTLSKADYEKHKVYACEVTHQG |
| | | LSSPVTKSFNRGEC |
| 345 | VH T30Y (69BIT)_HCDR1 | SYWMH |
| 346 | VH T30Y (69BIT)_HCDR2 | RIDPQSGGIKYAQKFQG |
| 347 | VH T30Y (69BIT)_HCDR3 | WDYGGYFDV |
| 348 | VH T30Y (69BIT)_VH | EVOLVQSGAEVKKPGASVKVSCKASGYTFYSYWMHWVRQA |
| | | PGQGLEWMGRIDPQSGGIKYAQKFQGRATLTVDTSTSTAY |
| | | MELSRLRSDDTAVYYCARWDYGGYFDVWGQGTLVTVSS |
| 349 | VH T30Y (69BIT)_Fab_HC | EVQLVQSGAEVKKPGASVKVSCKASGYTFYSYWMHWVRQA |
| | | PGQGLEWMGRIDPQSGGIKYAQKFQGRATLTVDTSTSTAY |
| | | MELSRLRSDDTAVYYCARWDYGGYFDVWGQGTLVTVSSAS |
| | | TKGPSVFPLAPSSKSTSGGTAALGCLVKDYFPEPVTVSWN |
| | | SGALTSGVHTFPAVLQSSGLYSLSSVVTVPSSSLGTQTYI |
| | | CNVNHKPSNTKVDKKVEPKSCDKTHT |
| 350 | VH T30Y (69BIT)_LCDR1 | RASQDITNYLN |
| 351 | T30Y (69BIT LCDR2 | YTSRLHS |
| 352 | T30Y (69BIT) | QQGDTLPWT |
| | LCDR3 | |
| 353 | VH T30Y (69BIT)_VL | DIQMTQSPSSLSASVGDRVTITCRASQDITNYLNWYQQKP |
| | | GKAVKLLIYYTSRLHSGVPSRFSGSGSGTDYTLTISSLQP |
| | | EDFATYFCQQGDTLPWTFGQGTKLEIK |
| 354 | VH T30Y (69BIT)_LC | DIQMTQSPSSLSASVGDRVTITCRASQDITNYLNWYQQKP |
| | | GKAVKLLIYYTSRLHSGVPSRFSGSGSGTDYTLTISSLQP |
| | | EDFATYFCQQGDTLPWTFGQGTKLEIKRTVAAPSVFIFPP |
| | | SDEQLKSGTASVVCLLNNFYPREAKVQWKVDNALQSGNSQ |
| | | ESVTEQDSKDSTYSLSSTLTLSKADYEKHKVYACEVTHQG |
| | | LSSPVTKSFNRGEC |
| 355 | VH S31Y (70BIT)_HCDR1 | YYWMH |
| 356 | VH S31Y (70BIT)_HCDR2 | RIDPQSGGIKYAQKFQG |
| 357 | VH S31Y (70BIT)_HCDR3 | WDYGGYFDV |
| 358 | VH S31Y (70BIT)_VH | EVQLVQSGAEVKKPGASVKVSCKASGYTFTYYWMHWVRQA |
| | | PGQGLEWMGRIDPQSGGIKYAQKFQGRATLTVDTSTSTAY |
| | | MELSRLRSDDTAVYYCARWDYGGYFDVWGQGTLVTVSS |
| 359 | VH S31Y (70BIT)_Fab_HC | EVQLVQSGAEVKKPGASVKVSCKASGYTFTYYWMHWVRQA |
| | | PGQGLEWMGRIDPQSGGIKYAQKFQGRATLTVDTSTSTAY |
| | | MELSRLRSDDTAVYYCARWDYGGYFDVWGQGTLVTVSSAS |
| | | TKGPSVFPLAPSSKSTSGGTAALGCLVKDYFPEPVTVSWN |
| | | SGALTSGVHTFPAVLQSSGLYSLSSVVTVPSSSLGTQTYI |
| | | CNVNHKPSNTKVDKKVEPKSCDKTHT |
| 360 | VH S31Y (70BIT)_LCDR1 | RASQDITNYLN |
| 361 | VH S31Y (70BIT)_LCDR2 | YTSRLHS |
| 362 | VH S31Y (70BIT)_LCDR3 | QQGDTLPWT |
| 363 | VH S31Y (70BIT)_VL | DIQMTQSPSSLSASVGDRVTITCRASQDITNYLNWYQQKP |
| | | GKAVKLLIYYTSRLHSGVPSRESGSGSGTDYTLTISSLQP |
| | | EDFATYFCQQGDTLPWTFGQGTKLEIK |
| 364 | VH S31Y (70BIT)_LC | DIQMTQSPSSLSASVGDRVTITCRASQDITNYLNWYQQKP |
| | | GKAVKLLIYYTSRLHSGVPSRFSGSGSGTDYTLTISSLQP |
| | | EDFATYFCQQGDTLPWTFGQGTKLEIKRTVAAPSVFIFPP |
| | | SDEQLKSGTASVVCLLNNFYPREAKVOWKVDNALQSGNSQ |
| | | ESVTEQDSKDSTYSLSSTLTLSKADYEKHKVYACEVTHQG |
| | | LSSPVTKSFNRGEC |
| 365 | VH W33Y (71BIT)_HCDR1 | SYYMH |
| 366 | VH W33Y (71BIT)_HCDR2 | RIDPQSGGIKYAQKFQG |
| 367 | VH W33Y (71BIT)_HCDR3 | WDYGGYFDV |
| 368 | VH W33Y (71BIT)_VH | EVQLVQSGAEVKKPGASVKVSCKASGYTFTSYYMHWVRQA |
| | | PGQGLEWMGRIDPQSGGIKYAQKFQGRATLTVDTSTSTAY |
| | | MELSRLRSDDTAVYYCARWDYGGYFDVWGQGTLVTVSS |
| 369 | VH W33Y (71BIT)_Fab_HC | EVQLVQSGAEVKKPGASVKVSCKASGYTFTSYYMHWVRQA |
| | | PGQGLEWMGRIDPQSGGIKYAQKFQGRATLTVDTSTSTAY |
| | | MELSRLRSDDTAVYYCARWDYGGYFDVWGQGTLVTVSSAS |
| | | TKGPSVFPLAPSSKSTSGGTAALGCLVKDYFPEPVTVSWN |
| | | SGALTSGVHTFPAVLQSSGLYSLSSVVTVPSSSLGTQTYI |
| | | CNVNHKPSNTKVDKKVEPKSCDKTHT |
| 370 | VH W33Y (71BIT)_LCDR1 | RASQDITNYLN |
| 371 | VH W33Y (71BIT)_LCDR2 | YTSRLHS |
| 372 | VH W33Y (71BIT)_LCDR3 | QQGDTLPWT |
| 373 | VH W33Y (71BIT)_VL | DIQMTQSPSSLSASVGDRVTITCRASQDITNYLNWYQQKP |
| | | GKAVKLLIYYTSRLHSGVPSRFSGSGSGTDYTLTISSLQP |
| | | EDFATYFCQQGDTLPWTFGQGTKLEIK |
| 374 | VH W33Y (71BIT)_LC | DIQMTQSPSSLSASVGDRVTITCRASQDITNYLNWYQQKP |
| | | GKAVKLLIYYTSRLHSGVPSRFSGSGSGTDYTLTISSLQP |
| | | EDFATYFCQQGDTLPWTFGQGTKLEIKRTVAAPSVFIFPP |
| | | SDEQLKSGTASVVCLLNNFYPREAKVQWKVDNALQSGNSQ |
| | | ESVTEQDSKDSTYSLSSTLTLSKADYEKHKVYACEVTHQG |
| | | LSSPVTKSENRGEC |
| 375 | VH M34Y (72BIT)_HCDR1 | SYWYH |
| 376 | VH M34Y (72BIT)_HCDR2 | RIDPQSGGIKYAQKFQG |
| 377 | VH M34Y (72BIT)_HCDR3 | WDYGGYFDV |
| 378 | VH M34Y (72BIT)_VH | EVQLVQSGAEVKKPGASVKVSCKASGYTFTSYWYHWVRQA |
| | | PGQGLEWMGRIDPQSGGIKYAQKFQGRATLTVDTSTSTAY |
| | | MELSRLRSDDTAVYYCARWDYGGYFDVWGQGTLVTVSS |
| 379 | VH M34Y (72BIT)_Fab_HC | EVQLVQSGAEVKKPGASVKVSCKASGYTFTSYWYHWVRQA |
| | | PGQGLEWMGRIDPQSGGIKYAQKFQGRATLTVDTSTSTAY |
| | | MELSRLRSDDTAVYYCARWDYGGYFDVWGQGTLVTVSSAS |
| | | TKGPSVFPLAPSSKSTSGGTAALGCLVKDYFPEPVTVSWN |
| | | SGALTSGVHTFPAVLQSSGLYSLSSVVTVPSSSLGTQTYI |
| | | CNVNHKPSNTKVDKKVEPKSCDKTHT |
| 380 | VH M34Y (72BIT)_LCDR1 | RASQDITNYLN |
| 381 | VH M34Y (72BIT)_LCDR2 | YTSRLHS |
| 382 | VH M34Y (72BIT)_LCDR3 | QQGDTLPWT |
| 383 | VH M34Y (72BIT)_VL | DIQMTQSPSSLSASVGDRVTITCRASQDITNYLNWYQQKP |
| | | GKAVKLLIYYTSRLHSGVPSRFSGSGSGTDYTLTISSLQP |
| | | EDFATYFCQQGDTLPWTFGQGTKLEIK |
| 384 | VH M34Y (72BIT)_LC | DIQMTQSPSSLSASVGDRVTITCRASQDITNYLNWYQQKP |
| | | GKAVKLLIYYTSRLHSGVPSRFSGSGSGTDYTLTISSLQP |
| | | EDFATYFCQQGDTLPWTFGQGTKLEIKRTVAAPSVFIFPP |
| | | SDEQLKSGTASVVCLLNNFYPREAKVQWKVDNALQSGNSQ |
| | | ESVTEQDSKDSTYSLSSTLTLSKADYEKHKVYACEVTHQG |
| | | LSSPVTKSFNRGEC |
| 385 | VH H35Y (73BIT)_HCDR1 | SYWMY |
| 386 | VH H35Y (73BIT)_HCDR2 | RIDPQSGGIKYAQKFQG |
| 387 | VH H35Y (73BIT)_HCDR3 | WDYGGYFDV |
| 388 | VH H35Y (73BIT)_VH | EVQLVQSGAEVKKPGASVKVSCKASGYTFTSYWMYWVRQA |
| | | PGQGLEWMGRIDPQSGGIKYAQKFQGRATLTVDTSTSTAY |
| | | MELSRLRSDDTAVYYCARWDYGGYFDVWGQGTLVTVSS |
| 389 | VH H35Y (73BIT)_Fab_HC | EVQLVQSGAEVKKPGASVKVSCKASGYTFTSYWMYWVRQA |
| | | PGQGLEWMGRIDPQSGGIKYAQKFQGRATLTVDTSTSTAY |
| | | MELSRLRSDDTAVYYCARWDYGGYFDVWGQGTLVTVSSAS |
| | | TKGPSVFPLAPSSKSTSGGTAALGCLVKDYFPEPVTVSWN |
| | | SGALTSGVHTFPAVLQSSGLYSLSSVVTVPSSSLGTQTYI |
| | | CNVNHKPSNTKVDKKVEPKSCDKTHT |
| 390 | VH H35Y (73BIT)_LCDR1 | RASQDITNYLN |
| 391 | VH H35Y (73BIT)_LCDR2 | YTSRLHS |
| 392 | VH H35Y (73BIT)_LCDR3 | QQGDTLPWT |
| 393 | VH H35Y (73BIT)_VL | DIQMTQSPSSLSASVGDRVTITCRASQDITNYLNWYQQKP |
| | | GKAVKLLIYYTSRLHSGVPSRESGSGSGTDYTLTISSLQP |
| | | EDFATYFCQQGDTLPWTFGQGTKLEIK |
| 394 | VH H35Y (73BIT)_LC | DIQMTQSPSSLSASVGDRVTITCRASQDITNYLNWYQQKP |
| | | GKAVKLLIYYTSRLHSGVPSRFSGSGSGTDYTLTISSLQP |
| | | EDFATYFCQQGDTLPWTFGQGTKLEIKRTVAAPSVFIFPP |
| | | SDEQLKSGTASVVCLLNNFYPREAKVQWKVDNALQSGNSQ |
| | | ESVTEQDSKDSTYSLSSTLTLSKADYEKHKVYACEVTHQG |
| | | LSSPVTKSFNRGEC |
| 395 | VH R50Y (75BIT)_HCDR1 | SYWYH |
| 396 | VH R50Y (75BIT)_HCDR2 | YIDPQSGGIKYAQKFQG |
| 397 | VH R50Y (75BIT)_HCDR3 | WDYGGYFDV |
| 398 | VH R50Y (75BIT)_VH | EVQLVQSGAEVKKPGASVKVSCKASGYTFTSYWMHWVRQA |
| | | PGQGLEWMGYIDPQSGGIKYAQKFQGRATLTVDTSTSTAY |
| | | MELSRLRSDDTAVYYCARWDYGGYFDVWGQGTLVTVSS |
| 399 | VH R50Y (75BIT)_Fab_HC | EVQLVQSGAEVKKPGASVKVSCKASGYTFTSYWMHWVRQA |
| | | PGQGLEWMGYIDPQSGGIKYAQKFQGRATLTVDTSTSTAY |
| | | MELSRLRSDDTAVYYCARWDYGGYFDVWGQGTLVTVSSAS |
| | | TKGPSVFPLAPSSKSTSGGTAALGCLVKDYFPEPVTVSWN |
| | | SGALTSGVHTFPAVLQSSGLYSLSSVVTVPSSSLGTQTYI |
| | | CNVNHKPSNTKVDKKVEPKSCDKTHT |
| 400 | VH R50Y (75BIT)_LCDR1 | RASQDITNYLN |
| 401 | VH R50Y (75BIT)_LCDR2 | YTSRLHS |
| 402 | VH R50Y (75BIT)_LCDR3 | QQGDTLPWT |
| 403 | VH R50Y (75BIT)_VL | DIQMTQSPSSLSASVGDRVTITCRASQDITNYLNWYQQKP |
| | | GKAVKLLIYYTSRLHSGVPSRFSGSGSGTDYTLTISSLQP |
| | | EDFATYFCQQGDTLPWTFGQGTKLEIK |
| 404 | VH R50Y (75BIT)_LC | DIQMTQSPSSLSASVGDRVTITCRASQDITNYLNWYQQKP |
| | | GKAVKLLIYYTSRLHSGVPSRFSGSGSGTDYTLTISSLQP |
| | | EDFATYFCQQGDTLPWTFGQGTKLEIKRTVAAPSVFIFPP |
| | | SDEQLKSGTASVVCLLNNFYPREAKVQWKVDNALQSGNSQ |
| | | ESVTEQDSKDSTYSLSSTLTLSKADYEKHKVYACEVTHQG |
| | | LSSPVTKSFNRGEC |
| 405 | VH I51Y (76BIT)_HCDR1 | SYWYH |
| 406 | VH I51Y (76BIT)_HCDR2 | RYDPQSGGIKYAQKFQG |
| 407 | VH 151Y (76BIT)_HCDR3 | WDYGGYFDV |
| 408 | VH 151Y (76BIT)_VH | EVOLVQSGAEVKKPGASVKVSCKASGYTFTSYWMHWVRQA |
| | | PGQGLEWMGRYDPQSGGIKYAQKFQGRATLTVDTSTSTAY |
| | | MELSRLRSDDTAVYYCARWDYGGYFDVWGQGTLVTVSS |
| 409 | VH I51Y (76BIT)_Fab_HC | EVQLVQSGAEVKKPGASVKVSCKASGYTFTSYWMHWVRQA |
| | | PGQGLEWMGRYDPQSGGIKYAQKFQGRATLTVDTSTSTAY |
| | | MELSRLRSDDTAVYYCARWDYGGYFDVWGQGTLVTVSSAS |
| | | TKGPSVFPLAPSSKSTSGGTAALGCLVKDYFPEPVTVSWN |
| | | SGALTSGVHTFPAVLQSSGLYSLSSVVTVPSSSLGTQTYI |
| | | CNVNHKPSNTKVDKKVEPKSCDKTHT |
| 410 | VH I51Y (76BIT)_LCDR1 | RASQDITNYLN |
| 411 | VH 151Y (76BIT)_LCDR2 | YTSRLHS |
| 412 | VH I51Y (76BIT)_LCDR3 | QQGDTLPWT |
| 413 | VH I51Y (76BIT)_VL | DIQMTQSPSSLSASVGDRVTITCRASQDITNYLNWYQQKP |
| | | GKAVKLLIYYTSRLHSGVPSRFSGSGSGTDYTLTISSLQP |
| | | EDFATYFCQQGDTLPWTFGQGTKLEIK |
| 414 | VH 151Y (76BIT)_LC | DIQMTQSPSSLSASVGDRVTITCRASQDITNYLNWYQQKP |
| | | GKAVKLLIYYTSRLHSGVPSRFSGSGSGTDYTLTISSLQP |
| | | EDFATYFCQQGDTLPWTFGQGTKLEIKRTVAAPSVFIFPP |
| | | SDEQLKSGTASVVCLLNNFYPREAKVQWKVDNALQSGNSQ |
| | | ESVTEQDSKDSTYSLSSTLTLSKADYEKHKVYACEVTHQG |
| | | LSSPVTKSFNRGEC |
| 415 | VH D52Y (77BIT)_HCDR1 | SYWYH |
| 416 | VH D52Y (77BIT) | RIYPQSGGIKYAQKFQG |
| | HCDR 2 | |
| 417 | VH D52Y (77BIT)_HCDR3 | WDYGGYFDV |
| 418 | VH D52Y (77BIT)_VH | EVQLVQSGAEVKKPGASVKVSCKASGYTFTSYWMHWVRQA |
| | | PGQGLEWMGRIYPQSGGIKYAQKFQGRATLTVDTSTSTAY |
| | | MELSRLRSDDTAVYYCARWDYGGYFDVWGQGTLVTVSS |
| 419 | VH D52Y (77BIT)_Fab_HC | EVQLVQSGAEVKKPGASVKVSCKASGYTFTSYWMHWVRQA |
| | | PGQGLEWMGRIYPQSGGIKYAQKFQGRATLTVDTSTSTAY |
| | | MELSRLRSDDTAVYYCARWDYGGYFDVWGQGTLVTVSSAS |
| | | TKGPSVFPLAPSSKSTSGGTAALGCLVKDYFPEPVTVSWN |
| | | SGALTSGVHTFPAVLQSSGLYSLSSVVTVPSSSLGTQTYI |
| | | CNVNHKPSNTKVDKKVEPKSCDKTHT |
| 420 | VH D52Y (77BIT)_LCDR1 | RASQDITNYLN |
| 421 | VH D52Y (77BIT)_LCDR2 | YTSRLHS |
| 422 | VH D52Y (77BIT)_LCDR3 | QQGDTLPWT |
| 423 | VH D52Y (77BIT)_VL | DIQMTQSPSSLSASVGDRVTITCRASQDITNYLNWYQQKP |
| | | GKAVKLLIYYTSRLHSGVPSRFSGSGSGTDYTLTISSLQP |
| | | EDFATYFCQQGDTLPWTFGQGTKLEIK |
| 424 | VH D52Y (77BIT)_LC | DIQMTQSPSSLSASVGDRVTITCRASQDITNYLNWYQQKP |
| | | GKAVKLLIYYTSRLHSGVPSRFSGSGSGTDYTLTISSLQP |
| | | EDFATYFCQQGDTLPWTFGQGTKLEIKRTVAAPSVFIFPP |
| | | SDEQLKSGTASVVCLLNNFYPREAKVQWKVDNALQSGNSQ |
| | | ESVTEQDSKDSTYSLSSTLTLSKADYEKHKVYACEVTHQG |
| | | LSSPVTKSFNRGEC |
| 425 | VH P52aY (78BIT)_HCDR1 | SYWYH |
| 426 | VH P52aY (78BIT)_HCDR2 | RIDYQSGGIKYAQKFQG |
| 427 | VH P52aY (78BIT)_HCDR3 | WDYGGYFDV |
| 428 | VH P52aY (78BIT)_VH | EVQLVQSGAEVKKPGASVKVSCKASGYTFTSYWMHWVRQA |
| | | PGQGLEWMGRIDYQSGGIKYAQKFQGRATLTVDTSTSTAY |
| | | MELSRLRSDDTAVYYCARWDYGGYFDVWGQGTLVTVSS |
| 429 | VH P52aY | EVQLVQSGAEVKKPGASVKVSCKASGYTFTSYWMHWVRQA |
| | (78BIT)_Fab_HC | PGQGLEWMGRIDYQSGGIKYAQKFQGRATLTVDTSTSTAY |
| | | MELSRLRSDDTAVYYCARWDYGGYFDVWGQGTLVTVSSAS |
| | | TKGPSVFPLAPSSKSTSGGTAALGCLVKDYFPEPVTVSWN |
| | | SGALTSGVHTFPAVLQSSGLYSLSSVVTVPSSSLGTQTYI |
| | | CNVNHKPSNTKVDKKVEPKSCDKTHT |
| 430 | VH P52aY (78BIT)_LCDR1 | RASQDITNYLN |
| 431 | VH P52aY (78BIT)_LCDR2 | YTSRLHS |
| 432 | VH P52aY (78BIT)_LCDR3 | QQGDTLPWT |
| 433 | VH P52aY (78BIT)_VL | DIQMTQSPSSLSASVGDRVTITCRASQDITNYLNWYQQKP |
| | | GKAVKLLIYYTSRLHSGVPSRFSGSGSGTDYTLTISSLQP |
| | | EDFATYFCQQGDTLPWTFGQGTKLEIK |
| 434 | VH P52aY (78BIT)_LC | DIQMTQSPSSLSASVGDRVTITCRASQDITNYLNWYQQKP |
| | | GKAVKLLIYYTSRLHSGVPSRESGSGSGTDYTLTISSLQP |
| | | EDFATYFCQQGDTLPWTFGQGTKLEIKRTVAAPSVFIFPP |
| | | SDEQLKSGTASVVCLLNNFYPREAKVQWKVDNALQSGNSQ |
| | | ESVTEQDSKDSTYSLSSTLTLSKADYEKHKVYACEVTHQG |
| | | LSSPVTKSENRGEC |
| 435 | VH Q53Y (79BIT)_HCDR1 | SYWYH |
| 436 | VH Q53Y (79BIT)_HCDR2 | RIDPYSGGIKYAQKFQG |
| 437 | VH Q53Y (79BIT)_HCDR3 | WDYGGYFDV |
| 438 | VH Q53Y (79BIT)_VH | EVQLVQSGAEVKKPGASVKVSCKASGYTFTSYWMHWVRQA |
| | | PGQGLEWMGRIDPYSGGIKYAQKFQGRATLTVDTSTSTAY |
| | | MELSRLRSDDTAVYYCARWDYGGYFDVWGQGTLVTVSS |
| 439 | VH Q53Y (79BIT)_Fab_HC | EVQLVQSGAEVKKPGASVKVSCKASGYTFTSYWMHWVRQA |
| | | PGQGLEWMGRIDPYSGGIKYAQKFQGRATLTVDTSTSTAY |
| | | MELSRLRSDDTAVYYCARWDYGGYFDVWGQGTLVTVSSAS |
| | | TKGPSVFPLAPSSKSTSGGTAALGCLVKDYFPEPVTVSWN |
| | | SGALTSGVHTFPAVLQSSGLYSLSSVVTVPSSSLGTQTYI |
| | | CNVNHKPSNTKVDKKVEPKSCDKTHT |
| 440 | VH Q53Y (79BIT)_LCDR1 | RASQDITNYLN |
| 441 | VH Q53Y (79BIT)_LCDR2 | YTSRLHS |
| 442 | VH Q53Y | QQGDTLPWT |
| | (79BIT)_LCDR3 | |
| 443 | VH Q53Y | DIQMTQSPSSLSASVGDRVTITCRASQDITNYLNWYQQKP |
| | (79BIT)_VL | GKAVKLLIYYTSRLHSGVPSRFSGSGSGTDYTLTISSLQP |
| | | EDFATYFCQQGDTLPWTFGQGTKLEIK |
| 444 | VH Q53Y (79BIT)_LC | DIQMTQSPSSLSASVGDRVTITCRASQDITNYLNWYQQKP |
| | | GKAVKLLIYYTSRLHSGVPSRFSGSGSGTDYTLTISSLQP |
| | | EDFATYFCQQGDTLPWTFGQGTKLEIKRTVAAPSVFIFPP |
| | | SDEQLKSGTASVVCLLNNFYPREAKVQWKVDNALQSGNSQ |
| | | ESVTEQDSKDSTYSLSSTLTLSKADYEKHKVYACEVTHQG |
| | | LSSPVTKSFNRGEC |
| 445 | 20E6 | SYWMH |
| | (80BGJ/85BIT)_HCDR1 | |
| 446 | 20E6 | RIDPQSGGIKYAQKFQG |
| | (80BGJ/85BIT)_HCDR2 | |
| 447 | 20E6 | WDYGGYFDV |
| | (80BGJ/85BIT)_HCDR3 | |
| 448 | 20E6 (80BGJ/85BIT)_VH | EVQLVQSGAEVKKPGASVKVSCKASGYTFTSYWMHWVRQA |
| | | PGQGLEWMGRIDPQSGGIKYAQKFQGRATLTVDTSTSTAY |
| | | MELSRLRSDDTAVYYCARWDYGGYFDVWGQGTLVTVSS |
| 449 | 20E6 | EVQLVQSGAEVKKPGASVKVSCKASGYTFTSYWMHWVRQA |
| | (80BGJ/85BIT)_Fab_HC | PGQGLEWMGRIDPQSGGIKYAQKFQGRATLTVDTSTSTAY |
| | | MELSRLRSDDTAVYYCARWDYGGYFDVWGQGTLVTVSSAS |
| | | TKGPSVFPLAPSSKSTSGGTAALGCLVKDYFPEPVTVSWN |
| | | SGALTSGVHTFPAVLQSSGLYSLSSVVTVPSSSLGTQTYI |
| | | CNVNHKPSNTKVDKKVEPKSCDKTHT |
| 450 | 20E6 | RASQDITNYLN |
| | (80BGJ/85BIT)_LCDR1 | |
| 451 | 20E6 | YTSRLHS |
| | (80BGJ/85BIT)_LCDR2 | |
| 452 | 20E6 | QQGDTLPWT |
| | (80BGJ/85BIT)_LCDR3 | |
| 453 | 20E6 (80BGJ/85BIT)_VL | DIQMTQSPSSLSASVGDRVTITCRASQDITNYLNWYQQKP |
| | | GKAVKLLIYYTSRLHSGVPSRFSGSGSGTDYTLTISSLQP |
| | | EDFATYFCQQGDTLPWTFGQGTKLEIK |
| 454 | 20E6 (80BGJ/85BIT)_LC | DIQMTQSPSSLSASVGDRVTITCRASQDITNYLNWYQQKP |
| | | GKAVKLLIYYTSRLHSGVPSRFSGSGSGTDYTLTISSLQP |
| | | EDFATYFCQQGDTLPWTFGQGTKLEIKRTVAAPSVFIFPP |
| | | SDEQLKSGTASVVCLLNNFYPREAKVQWKVDNALQSGNSQ |
| | | ESVTEQDSKDSTYSLSSTLTLSKADYEKHKVYACEVTHQG |
| | | LSSPVTKSENRGEC |
| 455 | VH S54Y (80BIT)_HCDR1 | SYWYH |
| 456 | VH S54Y (80BIT)_HCDR2 | RIDPQYGGIKYAQKFQG |
| 457 | VH S54Y (80BIT)_HCDR3 | WDYGGYFDV |
| 458 | VH S54Y (80BIT)_VH | EVOLVQSGAEVKKPGASVKVSCKASGYTFTSYWMHWVRQA |
| | | PGQGLEWMGRIDPQYGGIKYAQKFQGRATLTVDTSTSTAY |
| | | MELSRLRSDDTAVYYCARWDYGGYFDVWGQGTLVTVSS |
| 459 | VH S54Y (80BIT)_Fab_HC | EVQLVQSGAEVKKPGASVKVSCKASGYTFTSYWMHWVRQA |
| | | PGQGLEWMGRIDPQYGGIKYAQKFQGRATLTVDTSTSTAY |
| | | MELSRLRSDDTAVYYCARWDYGGYFDVWGQGTLVTVSSAS |
| | | TKGPSVFPLAPSSKSTSGGTAALGCLVKDYFPEPVTVSWN |
| | | SGALTSGVHTFPAVLQSSGLYSLSSVVTVPSSSLGTQTYI |
| | | CNVNHKPSNTKVDKKVEPKSCDKTHT |
| 460 | VH S54Y (80BIT)_LCDR1 | RASQDITNYLN |
| 461 | VH S54Y (80BIT)_LCDR2 | YTSRLHS |
| 462 | VH S54Y (80BIT)_LCDR3 | QQGDTLPWT |
| 463 | VH S54Y (80BIT)_VL | DIQMTQSPSSLSASVGDRVTITCRASQDITNYLNWYQQKP |
| | | GKAVKLLIYYTSRLHSGVPSRESGSGSGTDYTLTISSLQP |
| | | EDFATYFCQQGDTLPWTFGQGTKLEIK |
| 464 | VH S54Y (80BIT)_LC | DIQMTQSPSSLSASVGDRVTITCRASQDITNYLNWYQQKP |
| | | GKAVKLLIYYTSRLHSGVPSRFSGSGSGTDYTLTISSLQP |
| | | EDFATYFCQQGDTLPWTFGQGTKLEIKRTVAAPSVFIFPP |
| | | SDEQLKSGTASVVCLLNNFYPREAKVQWKVDNALQSGNSQ |
| | | ESVTEQDSKDSTYSLSSTLTLSKADYEKHKVYACEVTHQG |
| | | LSSPVTKSENRGEC |
| 465 | VH G55Y (81BIT)_HCDR1 | SYWYH |
| 466 | VH G55Y (81BIT)_HCDR2 | RIDPQSYGIKYAQKFQG |
| 467 | VH G55Y (81BIT)_HCDR3 | WDYGGYFDV |
| 468 | VH G55Y (81BIT)_VH | EVQLVQSGAEVKKPGASVKVSCKASGYTFTSYWMHWVRQA |
| | | PGQGLEWMGRIDPQSYGIKYAQKFQGRATLTVDTSTSTAY |
| | | MELSRLRSDDTAVYYCARWDYGGYFDVWGQGTLVTVSS |
| 469 | VH G55Y (81BIT)_Fab_HC | EVQLVQSGAEVKKPGASVKVSCKASGYTFTSYWMHWVRQA |
| | | PGQGLEWMGRIDPQSYGIKYAQKFQGRATLTVDTSTSTAY |
| | | MELSRLRSDDTAVYYCARWDYGGYFDVWGQGTLVTVSSAS |
| | | TKGPSVFPLAPSSKSTSGGTAALGCLVKDYFPEPVTVSWN |
| | | SGALTSGVHTFPAVLQSSGLYSLSSVVTVPSSSLGTQTYI |
| | | CNVNHKPSNTKVDKKVEPKSCDKTHT |
| 470 | VH G55Y (81BIT)_LCDR1 | RASQDITNYLN |
| 471 | VH G55Y (81BIT)_LCDR 2 | YTSRLHS |
| 472 | VH G55Y (81BIT)_LCDR3 | QQGDTLPWT |
| 473 | VH G55Y (81BIT)_VL | DIQMTQSPSSLSASVGDRVTITCRASQDITNYLNWYQQKP |
| | | GKAVKLLIYYTSRLHSGVPSRESGSGSGTDYTLTISSLQP |
| | | EDFATYFCQQGDTLPWTFGQGTKLEIK |
| 474 | VH G55Y (81BIT)_LC | DIQMTQSPSSLSASVGDRVTITCRASQDITNYLNWYQQKP |
| | | GKAVKLLIYYTSRLHSGVPSRFSGSGSGTDYTLTISSLQP |
| | | EDFATYFCQQGDTLPWTFGQGTKLEIKRTVAAPSVFIFPP |
| | | SDEQLKSGTASVVCLLNNFYPREAKVQWKVDNALQSGNSQ |
| | | ESVTEQDSKDSTYSLSSTLTLSKADYEKHKVYACEVTHQG |
| | | LSSPVTKSFNRGEC |
| 475 | VH G56Y (82BIT)_HCDR1 | SYWYH |
| 476 | VH G56Y (82BIT)_HCDR2 | RIDPQSGYIKYAQKFQG |
| 477 | VH G56Y (82BIT)_HCDR3 | WDYGGYFDV |
| 478 | VH G56Y (82BIT)_VH | EVQLVQSGAEVKKPGASVKVSCKASGYTFTSYWMHWVRQA |
| | | PGQGLEWMGRIDPQSGYIKYAQKFQGRATLTVDTSTSTAY |
| | | MELSRLRSDDTAVYYCARWDYGGYFDVWGQGTLVTVSS |
| 479 | VH G56Y (82BIT)_Fab_HC | EVQLVQSGAEVKKPGASVKVSCKASGYTFTSYWMHWVRQA |
| | | PGQGLEWMGRIDPQSGYIKYAQKFQGRATLTVDTSTSTAY |
| | | MELSRLRSDDTAVYYCARWDYGGYFDVWGQGTLVTVSSAS |
| | | TKGPSVFPLAPSSKSTSGGTAALGCLVKDYFPEPVTVSWN |
| | | SGALTSGVHTFPAVLQSSGLYSLSSVVTVPSSSLGTQTYI |
| | | CNVNHKPSNTKVDKKVEPKSCDKTHT |
| 480 | VH G56Y (82BIT)_LCDR1 | RASQDITNYLN |
| 481 | VH G56Y (82BIT)_LCDR2 | YTSRLHS |
| 482 | VH G56Y (82BIT)_LCDR3 | QQGDTLPWT |
| 483 | VH G56Y (82BIT)_VL | DIQMTQSPSSLSASVGDRVTITCRASQDITNYLNWYQQKP |
| | | GKAVKLLIYYTSRLHSGVPSRFSGSGSGTDYTLTISSLQP |
| | | EDFATYFCQQGDTLPWTFGQGTKLEIK |
| 484 | VH G56Y (82BIT)_LC | DIQMTQSPSSLSASVGDRVTITCRASQDITNYLNWYQQKP |
| | | GKAVKLLIYYTSRLHSGVPSRFSGSGSGTDYTLTISSLQP |
| | | EDFATYFCQQGDTLPWTFGQGTKLEIKRTVAAPSVFIFPP |
| | | SDEQLKSGTASVVCLLNNFYPREAKVQWKVDNALQSGNSQ |
| | | ESVTEQDSKDSTYSLSSTLTLSKADYEKHKVYACEVTHQG |
| | | LSSPVTKSENRGEC |
| 485 | VH I57Y (83BIT)_HCDR1 | SYWYH |
| 486 | VH I57Y (83BIT)_HCDR2 | RIDPQSGGYKYAQKFQG |
| 487 | VH I57Y (83BIT)_HCDR3 | WDYGGYFDV |
| 488 | VH I57Y (83BIT)_VH | EVQLVQSGAEVKKPGASVKVSCKASGYTFTSYWMHWVRQA |
| | | PGQGLEWMGRIDPQSGGYKYAQKFQGRATLTVDTSTSTAY |
| | | MELSRLRSDDTAVYYCARWDYGGYFDVWGQGTLVTVSS |
| 489 | VH 157Y (83BIT)_Fab_HC | EVOLVQSGAEVKKPGASVKVSCKASGYTFTSYWMHWVRQA |
| | | PGOGLEWMGRIDPQSGGYKYAQKFQGRATLTVDTSTSTAY |
| | | MELSRLRSDDTAVYYCARWDYGGYFDVWGQGTLVTVSSAS |
| | | TKGPSVFPLAPSSKSTSGGTAALGCLVKDYFPEPVTVSWN |
| | | SGALTSGVHTFPAVLQSSGLYSLSSVVTVPSSSLGTQTYI |
| | | CNVNHKPSNTKVDKKVEPKSCDKTHT |
| 490 | VH I57Y (83BIT)_LCDR1 | RASQDITNYLN |
| 491 | VH 157Y (83BIT)_LCDR2 | YTSRLHS |
| 492 | VH I57Y (83BIT)_LCDR3 | QQGDTLPWT |
| 493 | VH 157Y (83BIT)_VL | DIQMTQSPSSLSASVGDRVTITCRASQDITNYLNWYQQKP |
| | | GKAVKLLIYYTSRLHSGVPSRESGSGSGTDYTLTISSLQP |
| | | EDFATYFCQQGDTLPWTFGQGTKLEIK |
| 494 | VH I57Y (83BIT)_LC | DIQMTQSPSSLSASVGDRVTITCRASQDITNYLNWYQQKP |
| | | GKAVKLLIYYTSRLHSGVPSRFSGSGSGTDYTLTISSLQP |
| | | EDFATYFCQQGDTLPWTFGQGTKLEIKRTVAAPSVFIFPP |
| | | SDEQLKSGTASVVCLLNNFYPREAKVQWKVDNALQSGNSQ |
| | | ESVTEQDSKDSTYSLSSTLTLSKADYEKHKVYACEVTHQG |
| | | LSSPVTKSENRGEC |
| 495 | VH K58Y (84BIT )_HCDR1 | SYWYH |
| 496 | VH K58Y (84BIT)_HCDR2 | RIDPQSGGIYYAQKFQG |
| 497 | VH K58Y (84BIT)_HCDR3 | WDYGGYFDV |
| 498 | VH K58Y (84BIT)_VH | EVOLVQSGAEVKKPGASVKVSCKASGYTFTSYWMHWVRQA |
| | | PGQGLEWMGRIDPQSGGIYYAQKFQGRATLTVDTSTSTAY |
| | | MELSRLRSDDTAVYYCARWDYGGYFDVWGQGTLVTVSS |
| 499 | VH K58Y (84BIT)_Fab_HC | EVQLVQSGAEVKKPGASVKVSCKASGYTFTSYWMHWVRQA |
| | | PGQGLEWMGRIDPQSGGIYYAQKFQGRATLTVDTSTSTAY |
| | | MELSRLRSDDTAVYYCARWDYGGYFDVWGQGTLVTVSSAS |
| | | TKGPSVFPLAPSSKSTSGGTAALGCLVKDYFPEPVTVSWN |
| | | SGALTSGVHTFPAVLQSSGLYSLSSVVTVPSSSLGTQTYI |
| | | CNVNHKPSNTKVDKKVEPKSCDKTHT |
| 500 | VH K58Y (84BIT)_LCDR1 | RASQDITNYLN |
| 501 | VH K58Y (84BIT)_LCDR2 | YTSRLHS |
| 502 | VH K58Y (84BIT)_LCDR3 | QQGDTLPWT |
| 503 | VH K58Y (84BIT)_VL | DIQMTQSPSSLSASVGDRVTITCRASQDITNYLNWYQQKP |
| | | GKAVKLLIYYTSRLHSGVPSRESGSGSGTDYTLTISSLQP |
| | | EDFATYFCQQGDTLPWTFGQGTKLEIK |
| 504 | VH K58Y (84BIT)_LC | DIQMTQSPSSLSASVGDRVTITCRASQDITNYLNWYQQKP |
| | | GKAVKLLIYYTSRLHSGVPSRFSGSGSGTDYTLTISSLQP |
| | | EDFATYFCQQGDTLPWTFGQGTKLEIKRTVAAPSVFIFPP |
| | | SDEQLKSGTASVVCLLNNFYPREAKVQWKVDNALQSGNSQ |
| | | ESVTEQDSKDSTYSLSSTLTLSKADYEKHKVYACEVTHQG |
| | | LSSPVTKSFNRGEC |
| 505 | VH W95Y (88BIT)_HCDR1 | SYWYH |
| 506 | VH W95Y (88BIT)_HCDR2 | RIDPQSGGIKYAQKFQG |
| 507 | VH W95Y (88BIT HCDR3 | YDYGGYFDV |
| 508 | VH W95Y (88BIT)_VH | EVQLVQSGAEVKKPGASVKVSCKASGYTFTSYWMHWVRQA |
| | | PGQGLEWMGRIDPQSGGIKYAQKFQGRATLTVDTSTSTAY |
| | | MELSRLRSDDTAVYYCARYDYGGYFDVWGQGTLVTVSS |
| 509 | VH W95Y (88BIT)_Fab_HC | EVQLVQSGAEVKKPGASVKVSCKASGYTFTSYWMHWVRQA |
| | | PGQGLEWMGRIDPQSGGIKYAQKFQGRATLTVDTSTSTAY |
| | | MELSRLRSDDTAVYYCARYDYGGYFDVWGQGTLVTVSSAS |
| | | TKGPSVFPLAPSSKSTSGGTAALGCLVKDYFPEPVTVSWN |
| | | SGALTSGVHTFPAVLQSSGLYSLSSVVTVPSSSLGTQTYI |
| | | CNVNHKPSNTKVDKKVEPKSCDKTHT |
| 510 | VH W95Y (88BIT)_LCDR1 | RASQDITNYLN |
| 511 | VH W95Y (88BIT)_LCDR2 | YTSRLHS |
| 512 | VH W95Y (88BIT)_LCDR3 | QQGDTLPWT |
| 513 | VH W95Y (88BIT)_VL | DIQMTQSPSSLSASVGDRVTITCRASQDITNYLNWYQQKP |
| | | GKAVKLLIYYTSRLHSGVPSRESGSGSGTDYTLTISSLQP |
| | | EDFATYFCQQGDTLPWTFGQGTKLEIK |
| 514 | VH W95Y (88BIT)_LC | DIQMTQSPSSLSASVGDRVTITCRASQDITNYLNWYQQKP |
| | | GKAVKLLIYYTSRLHSGVPSRFSGSGSGTDYTLTISSLQP |
| | | EDFATYFCQQGDTLPWTFGQGTKLEIKRTVAAPSVFIFPP |
| | | SDEQLKSGTASVVCLLNNFYPREAKVQWKVDNALQSGNSQ |
| | | ESVTEQDSKDSTYSLSSTLTLSKADYEKHKVYACEVTHQG |
| | | LSSPVTKSFNRGEC |
| 515 | VH D96Y (64BIT)_HCDR1 | SYWYH |
| 516 | VH D96Y (64BIT)_HCDR2 | RIDPQSGGIKYAQKFQG |
| 517 | VH D96Y (64BIT)_HCDR3 | WYYGGYFDV |
| 518 | VH D96Y (64BIT)_VH | EVQLVQSGAEVKKPGASVKVSCKASGYTFTSYWMHWVRQA |
| | | PGQGLEWMGRIDPQSGGIKYAQKFQGRATLTVDTSTSTAY |
| | | MELSRLRSDDTAVYYCARWYYGGYFDVWGQGTLVTVSS |
| 519 | VH D96Y (64BIT)_Fab_HC | EVQLVQSGAEVKKPGASVKVSCKASGYTFTSYWMHWVRQA |
| | | PGQGLEWMGRIDPQSGGIKYAQKFQGRATLTVDTSTSTAY |
| | | MELSRLRSDDTAVYYCARWYYGGYFDVWGQGTLVTVSSAS |
| | | TKGPSVFPLAPSSKSTSGGTAALGCLVKDYFPEPVTVSWN |
| | | SGALTSGVHTFPAVLQSSGLYSLSSVVTVPSSSLGTQTYI |
| | | CNVNHKPSNTKVDKKVEPKSCDKTHT |
| 520 | VH D96Y (64BIT)_LCDR1 | RASQDITNYLN |
| 521 | VH D96Y (64BIT)_LCDR2 | YTSRLHS |
| 522 | VH D96Y (64BIT)_LCDR3 | QQGDTLPWT |
| 523 | VH D96Y (64BIT)_VL | DIQMTQSPSSLSASVGDRVTITCRASQDITNYLNWYQQKP |
| | | GKAVKLLIYYTSRLHSGVPSRFSGSGSGTDYTLTISSLQP |
| | | EDFATYFCQQGDTLPWTFGQGTKLEIK |
| 524 | VH D96Y (64BIT)_LC | DIQMTQSPSSLSASVGDRVTITCRASQDITNYLNWYQQKP |
| | | GKAVKLLIYYTSRLHSGVPSRESGSGSGTDYTLTISSLQP |
| | | EDFATYFCQQGDTLPWTFGQGTKLEIKRTVAAPSVFIFPP |
| | | SDEQLKSGTASVVCLLNNFYPREAKVQWKVDNALQSGNSQ |
| | | ESVTEQDSKDSTYSLSSTLTLSKADYEKHKVYACEVTHQG |
| | | LSSPVTKSFNRGEC |
| 525 | VH G98Y (65BIT)_HCDR1 | SYWYH |
| 526 | VH G98Y (65BIT )_HCDR2 | RIDPQSGGIKYAQKFQG |
| 527 | VH G98Y (65BIT)_HCDR3 | WDYYGYFDV |
| 528 | VH G98Y (65BIT)_VH | EVOLVQSGAEVKKPGASVKVSCKASGYTFTSYWMHWVRQA |
| | | PGQGLEWMGRIDPQSGGIKYAQKFQGRATLTVDTSTSTAY |
| | | MELSRLRSDDTAVYYCARWDYYGYFDVWGQGTLVTVSS |
| 529 | VH G98Y (65BIT)_Fab_HC | EVQLVQSGAEVKKPGASVKVSCKASGYTFTSYWMHWVRQA |
| | | PGQGLEWMGRIDPQSGGIKYAQKFQGRATLTVDTSTSTAY |
| | | MELSRLRSDDTAVYYCARWDYYGYFDVWGQGTLVTVSSAS |
| | | TKGPSVFPLAPSSKSTSGGTAALGCLVKDYFPEPVTVSWN |
| | | SGALTSGVHTFPAVLQSSGLYSLSSVVTVPSSSLGTQTYI |
| | | CNVNHKPSNTKVDKKVEPKSCDKTHT |
| 530 | VH G98Y (65BIT)_LCDR1 | RASQDITNYLN |
| 531 | VH G98Y (65BIT)_LCDR2 | YTSRLHS |
| 532 | VH G98Y (65BIT)_LCDR3 | QQGDTLPWT |
| 533 | VH G98Y (65BIT)_VL | DIQMTQSPSSLSASVGDRVTITCRASQDITNYLNWYQQKP |
| | | GKAVKLLIYYTSRLHSGVPSRFSGSGSGTDYTLTISSLQP |
| | | EDFATYFCQQGDTLPWTFGQGTKLEIK |
| 534 | VH G98Y (65BIT)_LC | DIQMTQSPSSLSASVGDRVTITCRASQDITNYLNWYQQKP |
| | | GKAVKLLIYYTSRLHSGVPSRFSGSGSGTDYTLTISSLQP |
| | | EDFATYFCQQGDTLPWTFGQGTKLEIKRTVAAPSVFIFPP |
| | | SDEQLKSGTASVVCLLNNFYPREAKVQWKVDNALQSGNSQ |
| | | ESVTEQDSKDSTYSLSSTLTLSKADYEKHKVYACEVTHQG |
| | | LSSPVTKSFNRGEC |
| 535 | VH G99Y (66BIT)_HCDR1 | SYWYH |
| 536 | VH G99Y (66BIT)_HCDR2 | RIDPQSGGIKYAQKFQG |
| 537 | VH G99Y (66BIT)_HCDR3 | WDYGYYFDV |
| 538 | VH G99Y (66BIT)_VH | EVQLVQSGAEVKKPGASVKVSCKASGYTFTSYWMHWVRQA |
| | | PGQGLEWMGRIDPQSGGIKYAQKFQGRATLTVDTSTSTAY |
| | | MELSRLRSDDTAVYYCARWDYGYYFDVWGQGTLVTVSS |
| 539 | VH G99Y (66BIT)_Fab_HC | EVQLVQSGAEVKKPGASVKVSCKASGYTFTSYWMHWVRQA |
| | | PGQGLEWMGRIDPQSGGIKYAQKFQGRATLTVDTSTSTAY |
| | | MELSRLRSDDTAVYYCARWDYGYYFDVWGQGTLVTVSSAS |
| | | TKGPSVFPLAPSSKSTSGGTAALGCLVKDYFPEPVTVSWN |
| | | SGALTSGVHTFPAVLQSSGLYSLSSVVTVPSSSLGTQTYI |
| | | CNVNHKPSNTKVDKKVEPKSCDKTHT |
| 540 | VH G99Y (66BIT)_LCDR1 | RASQDITNYLN |
| 541 | VH G99Y (66BIT)_ | YTSRLHS |
| | LCDR2 | |
| 542 | VH G99Y (66BIT)_LCDR3 | QQGDTLPWT |
| 543 | VH G99Y (66BIT)_VL | DIQMTQSPSSLSASVGDRVTITCRASQDITNYLNWYQQKP |
| | | GKAVKLLIYYTSRLHSGVPSRESGSGSGTDYTLTISSLQP |
| | | EDFATYFCQQGDTLPWTFGQGTKLEIK |
| 544 | VH G99Y (66BIT)_LC | DIQMTQSPSSLSASVGDRVTITCRASQDITNYLNWYQQKP |
| | | GKAVKLLIYYTSRLHSGVPSRFSGSGSGTDYTLTISSLQP |
| | | EDFATYFCQQGDTLPWTFGQGTKLEIKRTVAAPSVFIFPP |
| | | SDEQLKSGTASVVCLLNNFYPREAKVQWKVDNALQSGNSQ |
| | | ESVTEQDSKDSTYSLSSTLTLSKADYEKHKVYACEVTHQG |
| | | LSSPVTKSFNRGEC |

TABLE 7
ForteBio off-rate screen for tyrosine scanning mutants

| | Binding response | k_{off} | Fold |
|---|---|---|---|
| Identifier | (nm) | (×10⁻² s⁻¹) | change |
| 20E6 (80BGJ) | 0.253 | 4.68 | 1.0 |
| 20E6 (85BIT) | 0.580 | 3.81 | 1.1 |
| VL R24Y (38BIT) | 0.446 | 2.70 | 1.6 |
| VL A25Y (39BIT) | 0.043 | NB | NA |
| VL S26Y (40BIT) | 0.371 | 2.83 | 1.5 |
| VL Q27Y (41BIT) | 0.427 | 2.29 | 1.8 |
| VL D28Y (42BIT) | 0.207 | 3.18 | 1.3 |
| VL I29Y (43BIT) | 0.071 | 2.64 | 1.6 |
| VL T30Y (44BIT) | 0.472 | 1.62 | 2.6 |
| VL N31Y (45BIT) | 0.344 | 2.41 | 1.8 |
| VL L33Y (46BIT) | 0.095 | 4.13 | 1.0 |
| VL N34Y (47BIT) | 0.221 | 4.36 | 1.0 |
| VL T51Y (48BIT) | 0.204 | 5.08 | 0.8 |
| VL S52Y (49BIT) | 0.431 | 4.09 | 1.0 |
| VL R53Y (50BIT) | 0.365 | 2.70 | 1.6 |
| VL L54Y (51BIT) | 0.299 | 4.05 | 1.0 |
| VL H55Y (52BIT) | 0.265 | 3.85 | 1.1 |
| VL S56Y (53BIT) | 0.344 | 3.24 | 1.3 |
| VL Q89Y (54BIT) | 0.035 | NB | NA |
| VL Q90Y (55BIT) | 0.040 | NB | NA |
| VL G91Y (56BIT) | 0.044 | NB | NA |
| VL D92Y (57BIT) | 0.046 | NB | NA |
| VL T93Y (58BIT) | 0.586 | 2.73 | 1.5 |
| VL L94Y (59BIT) | 0.308 | 5.71 | 0.7 |
| VL P95Y (60BIT) | 0.015 | NB | NA |
| VH T28Y (67BIT) | 0.326 | 3.43 | 1.2 |
| VH F29Y (68BIT) | 0.597 | 3.36 | 1.3 |
| VH T30Y (69BIT) | 0.372 | 3.65 | 1.2 |
| VH S31Y (70BIT) | 0.696 | 3.61 | 1.2 |
| VH W33Y (71BIT) | 0.770 | 2.30 | 1.8 |
| VH M34Y (72BIT) | 0.623 | 4.14 | 1.0 |
| VH H35Y (73BIT) | 0.334 | 4.71 | 0.9 |
| VH RSOY (75BIT) | 0.324 | 4.45 | 0.9 |
| VH 151Y (76BIT) | 0.600 | 3.79 | 1.1 |
| VH D52Y (77BIT) | 0.042 | NB | NA |
| VH P52aY (78BIT) | 0.566 | 4.54 | 0.9 |
| VH Q53Y (79BIT) | 0.625 | 4.16 | 1.0 |
| VH S54Y (80BIT) | 0.588 | 4.06 | 1.0 |
| VH G55Y (81BIT) | 0.542 | 3.60 | 1.2 |
| VH G56Y (82BIT) | 0.569 | 4.36 | 1.0 |
| VH I57Y (83BIT) | 0.555 | 4.30 | 1.0 |
| VH K58Y (84BIT) | 0.339 | 3.27 | 1.3 |
| VH W95Y (88BIT) | 0.638 | 4.25 | 1.0 |
| VH D96Y (64BIT) | 0.102 | 7.46 | 0.6 |
| VH G98Y (65BIT) | 0.037 | NB | NA |
| VH G99Y (66BIT) | 0.055 | 4.76 | 0.9 |

NB: No binding observed
NA: Not applicable

### Example 6: Analysis of Double Tyrosine 20E6 Variants Binding Human LAP-TGFb1, 2 and 3 by Surface Plasmon Resonance

[0796] Further studies were performed in order to determine whether further affinity improvement may be achieved by combining two or more tyrosine substitutions. Accordingly, three additional 20E6 variants were generated that contained two CDR tyrosine substitutions (VH-W33Y/VL-T30Y, VH-W33Y/VL-R53Y, and VH-W33Y/NL-T93Y, Kabat numbering, Table 8) and these molecules were analyzed for their interactions with LAP-TGFβ1.

[0797] A Series S CM4 sensor chip (GE Healthcare, catalog BR100534) was immobilized with an anti-human Fc capture antibody following the kit protocol (GE Healthcare, catalog BR100839) on a Biacore T200 instrument with 1× HBS-EP+ (Teknova, catalog H8022). Kinetic binding interactions between human LAP-TGFβ isoform 1 and tyrosine scanning double mutants were performed in 1× HBS-EP4 with 0.1 mg/mL, bovine serum albumin (BSA) (Jackson Immunoresearch, catalog 001-000-162) at 25° C. Approximately 70-80 RU of human LAP-TGFβ-Fc isoform 1 was captured to the anti-human Fc surface followed by injection of 1:3 serially diluted Fab from 1000 nM to 1.37 nM and including a negative control 0 nM Fab. Binding specificity between human LAP-TGFβ isoforms 2 and 3 and the tyrosine scanning double mutants were performed in 1× HEPES-buffered saline with EDTA and surfactant (HBS)-EP)+with 0.1 mg/mL BSA at 25° C. Approximately 25-40 relative units (RU) of human LAP-TGFβ2 and 3 were captured to the anti-human Fc surface followed by injection of 1:4 serially diluted Fab from 1000 nM to 3.91 nM including a negative control 0 nM Fab. The binding data were double referenced by subtraction of signal from a reference (capture surface only) flow cell and the negative control 0 nM Fab injection. Binding rate constants were determined by fitting the data with a 1:1 binding model (GE Healthcare Biacore T200 Evaluation software 3.0). As shown in Table 9, antibody 20E6 binds to human LAP-TGFβ1 with nanomolar affinity, but no appreciable signal increase was observed for human LAP-TGFβ isoform 2 or 3. The tyrosine scanning double mutants VH33/VL30, VH33/VL53, and VH33/VL93 demonstrated 4 fold to 20 fold improved binding affinity to human LAP-TGFβ1 over antibody 20E6. Like antibody 20E6, the tyrosine scanning double mutants did not bind human LAP-TGFβ isoform 2 and 3.

TABLE 8
20E6 antibody variants

| Seq | | |
|---|---|---|
| ID | Identifier | Amino acid sequence |
| 545 | VH W33Y/VL T30Y | SYYMH |
| | (90BJM)_HCDR1 | |
| 546 | VH W33Y/VL T30Y | RIDPQSGGIKYAQKFQG |
| | (90BJM)_HCDR2 | |
| 547 | VH W33Y/VL T30Y | WDYGGYFDV |
| | (90BJM)_HCDR3 | |
| 548 | VH W33Y/VL T30Y | EVQLVQSGAEVKKPGASVKVSCKASGYTFTSYYMHWVRQA |
| | (90BJM)_VH | PGQGLEWMGRIDPQSGGIKYAQKFQGRATLTVDTSTSTAY |
| | | MELSRLRSDDTAVYYCARWDYGGYFDVWGQGTLVTVSS |
| 549 | VH W33Y/VL T30Y | EVQLVQSGAEVKKPGASVKVSCKASGYTFTSYYMHWVRQA |
| | (90BJM)_Fab_HC | PGQGLEWMGRIDPQSGGIKYAQKFQGRATLTVDTSTSTAY |
| | | MELSRLRSDDTAVYYCARWDYGGYFDVWGQGTLVTVSSAS |
| | | TKGPSVFPLAPSSKSTSGGTAALGCLVKDYFPEPVTVSWN |
| | | SGALTSGVHTFPAVLQSSGLYSLSSVVTVPSSSLGTQTYI |
| | | CNVNHKPSNTKVDKKVEPKSCDKTHT |
| 550 | VH W33Y/VL T30Y | RASQDIYNYLN |
| | (90BJM)_LCDR1 | |
| 551 | VH W33Y/VL T30Y | YTSRLHS |
| | (90BJM)_LCDR2 | |
| 552 | VH W33Y/VL T30Y | QQGDTLPWT |
| | (90BJM)_LCDR3 | |
| 553 | VH W33Y/VL T30Y | DIQMTQSPSSLSASVGDRVTITCRASQDIYNYLNWYQQKP |
| | (90BJM)_VL | GKAVKLLIYYTSRLHSGVPSRFSGSGSGTDYTLTISSLQP |
| | | EDFATYFCQQGDTLPWTFGQGTKLEIK |
| 554 | VH W33Y/VL T30Y | DIQMTQSPSSLSASVGDRVTITCRASQDIYNYLNWYQQKP |
| | (90BJM)_LC | GKAVKLLIYYTSRLHSGVPSRFSGSGSGTDYTLTISSLQP |
| | | EDFATYFCQQGDTLPWTFGQGTKLEIKRTVAAPSVFIFPP |
| | | SDEQLKSGTASVVCLLNNFYPREAKVQWKVDNALQSGNSQ |
| | | ESVTEQDSKDSTYSLSSTLTLSKADYEKHKVYACEVTHQG |
| | | LSSPVTKSFNRGEC |
| 555 | VH W33Y/VL R53Y | SYYMH |
| | (91BJM)_HCDR1 | |
| 556 | VH W33Y/VL R53Y | RIDPQSGGIKYAQKFQG |
| | (91BJM)_HCDR2 | |
| 557 | VH W33Y/VL R53Y | WDYGGYFDV |
| | (91BJM)_HCDR3 | |
| 558 | VH W33Y/VL R53Y | EVQLVQSGAEVKKPGASVKVSCKASGYTFTSYYMHWVRQA |
| | (91BJM)_VH | PGQGLEWMGRIDPQSGGIKYAQKFQGRATLTVDTSTSTAY |
| | | MELSRLRSDDTAVYYCARWDYGGYFDVWGQGTLVTVSS |
| 559 | VH W33Y/VL R53Y | EVQLVQSGAEVKKPGASVKVSCKASGYTFTSYYMHWVRQA |
| | (91BJM)_Fab_HC | PGQGLEWMGRIDPQSGGIKYAQKFQGRATLTVDTSTSTAY |
| | | MELSRLRSDDTAVYYCARWDYGGYFDVWGQGTLVTVSSAS |
| | | TKGPSVFPLAPSSKSTSGGTAALGCLVKDYFPEPVTVSWN |
| | | SGALTSGVHTFPAVLQSSGLYSLSSVVTVPSSSLGTQTYI |
| | | CNVNHKPSNTKVDKKVEPKSCDKTHT |
| 560 | VH W33Y/VL R53Y | RASQDITNYLN |
| | (91BJM)_LCDR1 | |
| 561 | VH W33Y/VL R53Y | YTSYLHS |
| | (91BJM)_LCDR2 | |
| 562 | VH W33Y/VL R53Y | QQGDTLPWT |
| | (91BJM)_LCDR3 | |
| 563 | VH W33Y/VL R53Y | DIQMTQSPSSLSASVGDRVTITCRASQDITNYLNWYQQKP |
| | (91BJM)_VL | GKAVKLLIYYTSYLHSGVPSRFSGSGSGTDYTLTISSLQP |
| | | EDFATYFCQQGDTLPWTFGQGTKLEIK |
| 564 | VH W33Y/VL R53Y | DIQMTQSPSSLSASVGDRVTITCRASQDITNYLNWYQQKP |
| | (91BJM)_LC | GKAVKLLIYYTSYLHSGVPSRFSGSGSGTDYTLTISSLQP |
| | | EDFATYFCQQGDTLPWTFGQGTKLEIKRTVAAPSVFIFPP |
| | | SDEQLKSGTASVVCLLNNFYPREAKVQWKVDNALQSGNSQ |
| | | ESVTEQDSKDSTYSLSSTLTLSKADYEKHKVYACEVTHQG |
| | | LSSPVTKSFNRGEC |
| 565 | VH W33Y/VL T93Y | SYYMH |
| | (92BJM)_HCDR1 | |
| 566 | VH W33Y/VL T93Y | RIDPQSGGIKYAQKFQG |
| | (92BJM)_HCDR2 | |
| 567 | VH W33Y/VL T93Y | WDYGGYFDV |
| | (92BJM)_HCDR3 | |
| 568 | VH W33Y/VL T93Y | EVQLVQSGAEVKKPGASVKVSCKASGYTFTSYYMHWVRQA |
| | (92BJM)_VH | PGQGLEWMGRIDPQSGGIKYAQKFQGRATLTVDTSTSTAY |
| | | MELSRLRSDDTAVYYCARWDYGGYFDVWGQGTLVTVSS |
| 569 | VH W33Y/VL T93Y | EVQLVQSGAEVKKPGASVKVSCKASGYTFTSYYMHWVRQA |
| | (92BJM)_Fab_HC | PGQGLEWMGRIDPQSGGIKYAQKFQGRATLTVDTSTSTAY |
| | | MELSRLRSDDTAVYYCARWDYGGYFDVWGQGTLVTVSSAS |
| | | TKGPSVFPLAPSSKSTSGGTAALGCLVKDYFPEPVTVSWN |
| | | SGALTSGVHTFPAVLQSSGLYSLSSVVTVPSSSLGTQTYI |
| | | CNVNHKPSNTKVDKKVEPKSCDKTHT |
| 570 | VH W33Y/VL T93Y | RASQDITNYLN |
| | (92BJM)_LCDR1 | |
| 571 | VH W33Y/VL T93Y | YTSRLHS |
| | (92BJM)_LCDR2 | |
| 572 | VH W33Y/VL T93Y | QQGDYLPWT |
| | (92BJM)_LCDR3 | |
| 573 | VH W33Y/VL T93Y | DIQMTQSPSSLSASVGDRVTITCRASQDITNYLNWYQQKP |
| | (92BJM)_VL | GKAVKLLIYYTSRLHSGVPSRFSGSGSGTDYTLTISSLQP |
| | | EDFATYFCQQGDYLPWTFGQGTKLEIK |
| 574 | VH W33Y/VL T93Y | DIQMTQSPSSLSASVGDRVTITCRASQDITNYLNWYQQKP |
| | (92BJM)_LC | GKAVKLLIYYTSRLHSGVPSRFSGSGSGTDYTLTISSLQP |
| | | EDFATYFCQQGDYLPWTFGQGTKLEIKRTVAAPSVFIFPP |
| | | SDEQLKSGTASVVCLLNNFYPREAKVQWKVDNALQSGNSQ |
| | | ESVTEQDSKDSTYSLSSTLTLSKADYEKHKVYACEVTHQG |
| | | LSSPVTKSFNRGEC |

TABLE 9
Parameters for 20E6 and double tyrosine variants
binding to human LAP-TGFβ isoforms 1, 2, and 3

| | | | | | Fold |
|---|---|---|---|---|---|
| | | kₒₙ | k_{off} | k_{D} | improvement |
| ID | Species | (×10⁶ M⁻¹s⁻¹) | (×10⁻² s⁻¹) | (nM) | in K_{D} |
| 20E6 (80BGJ) | LAP-TGFβ1 | 1.45 ± 0.11 | 10.3 ± 2.39 | 81.2 ± 2.00 | 1.0 |
| | LAP-TGFβ2 | NB | NB | NB | NB |
| | LAP-TGFβ3 | NB | NB | NB | NB |
| VH W33Y/VL T30Y | LAP-TGFβ1 | 1.89 ± 0.04 | 0.75 ± 0.01 | 4.00 ± 0.06 | 20 |
| (90BJM) | LAP-TGFβ2 | NB | NB | NB | NB |
| | LAP-TGFβ3 | NB | NB | NB | NB |
| VH W33Y/VL R53Y | LAP-TGFβ1 | 0.91 ± 0.02 | 1.54 ± 0.01 | 11.8 ± 8.80 | 7.0 |
| (91BJM) | LAP-TGFβ2 | NB | NB | NB | NB |
| | LAP-TGFβ3 | NB | NB | NB | NB |
| VH W33Y/VL T93Y | LAP-TGFβ1 | 0.65 ± 0.01 | 1.34 ± n/a | 20.6 ± 0.15 | 4.0 |
| (92BJM) | LAP-TGFβ2 | NB | NB | NB | NB |
| | LAP-TGFβ3 | NB | NB | NB | NB |

All values reported as average ± standard deviation from triplicate measurements
NB: No binding observed

### Example 7: Construction of Rationally Designed Libraries for Selection of Affinity-Matured 20E6 Variants by Yeast Display Technology

[0798] To improve the affinity of humanized 20E6 by an in vitro library display and selection strategy, the investigators rationally designed 20E6 variant libraries with structural information derived from the 20E6/human LAP-TGFb1 complex generated by Cryo EM structural analysis. CDR positions were selected to introduce sequence diversity based on the following criteria: (1.) less than 5 angstroms from human LAP-TGFb1 in the immune complex; (2.) identification between the 20E6 antibody sequence and the human IGKV1-33*01 and IGHV1-2*05 germline sequences used for 20E6 humanization; and (3.) whether the CDR position is a somatic mutation hot spot in human IGKV1-33*01 and IGHV1-2*05.

[0799] The studies were performed to determine inter alia whether changes introduced to 20E6 CDR residues that are within 5 angstroms of LAP-TGFb1 would have a high probability of impacting the interaction between 20E6 and LAP-TGFb1. To minimize introducing potential immunogenicity in human, however, the studies excluded 20E6 CDR residues that were identical to IGKV1-33*01 sequences or IGHV1-2*05 sequences and were at positions rarely mutated in human antibodies from these two germlines. Conversely, sequence diversities were utilized at selected 20E6 CDR positions that are highly mutated in IGKV1-33*01- or to IGIHV1-2*05-derived human antibodies, which are available at IMGT (imgt.org), even if their distance from LAP-TGFb1 are greater than 5 angstroms. The selected 20E6 CDR residues for potential changes include light chain residues T30, N31, Y32, Y50, T51, R53, D92, T93, L94, and heavy chain S31, W33, M34, H35, Q53, S54, G56, 157, K58, W95, D96, Y97, G98, G99, Y100 (all Kabat numbering).

[0800] Different approaches were utilized to introduce diversity into selected CDR positions. In the first ‘doping’ approach, each of the three nucleotides of the selected CDR codon was synthesized at a ratio of 79% original and 7% each the other three nucleotides. In general, this 79:7:7:7 doping scheme would result in the CDR residue having an amino acid frequency distribution of approximately 60% parental residue and approximately 40% mutated to the other 19 amino acids and stop codon at uneven ratios, depending on number and position of sequence changes at the nucleotide level. Three ‘doped’ libraries for antibody 20E6 were constructed by routine recombinant DNA technologies containing CDR diversities in HCDR1 and 2, in HCDR3, and in all three LCDRs, respectively. In the doped light chain library, toggle mutations were included at positions 1-155E/S56T (Kabat numbering) in LCDR2 in an attempt to mutate the H55/S56 in 20E6 back to E55/T56 in IGKV1-33*01 in order to further increase identity to human sequence (FIG. 2).

[0801] In a second approach, the TRIM nucleotide synthesis technology was utilized to diversify the light chain at residues T30, Y50, T51, R53, T93, and the heavy chain at residues S31, W33, Q53, 157, K58, W95, D96, Y97, G98, G99 (Kabat numbering). These residues of the 20E6 antibody encompass CDR positions that differ from the human germline IGKV1-33*01 or IGHV1-2*05 sequence. By synthesizing residues at these CDR positions as 49% of the parental codon and 51% of a mixture of 17 amino acid codons at 3% each (excluding methionine, cysteine, tryptophan), investigators were able to avoid undesirable mutations and stop codons while sampling all diversities more evenly. Additionally, the 79:7:7:7 doping method was used to diversify light chain residues N31, Y32, D92, L94, and heavy chain residues M34, H35, S54, G56, Y100 (Kabat numbering). These positions have the same residue between 20E6 antibody and the IGKV1-33*01 molecule or the IGHV1-2*05 molecule, and it was understood that the doping approach would better reflect the human antibody sequence diversity and frequency distribution at these positions (FIG. 3). Three ‘TRIM’ libraries for antibody 20E6 were constructed by routine recombinant DNA technologies containing CDR diversities in HCDR1 and 2, in HCDR3, and in all three LCDRs, respectively.

[0802] The doping 20E6 variant libraries and the TRIM 20E6 variant libraries were transformed into yeast cells by electroporation and displayed on cell surfaces as Fab fragments. Yeast libraries were generated by high-efficiency transformation of a genetically modified version of the BJ5465 strain (ATCC). Cells were grown to an optical density (OD) 600 nm of 1.6, spun down and washed 2× with water (or, in certain cases, 1 M sorbitol+1 mM CaCl₂) and 1× with electroporation buffer (1 M sorbitol+1 mM CaCl₂). Cells were then incubated in pre-treatment buffer (0.1 M LiAc+2.5 mM tris(2-carboxyethyl)phosphine (TCEP)) with shaking for 30 minutes at 30° C. Next, cells were spun down, washed 2× with cold electroporation buffer, and re-suspended in electroporation buffer to a final concentration of 2×10⁹ cells/mL. An amount (4 μg) of linearized vector and of DNA insert (12 μg) were added to 400 μL cells per cuvette. Electroporation using the exponential decay protocol was performed with a 2 mm cuvette with the following parameters: 2.6 kV, 200Ω resistance, 25 micro farad (ρF) capacitance, typically resulting in a time constant of 4.0 milliseconds (ms). After electroporation, recovery media (equal parts yeast extract-peptone-dextrose (YPD) media and 1 M sorbitol) was added and cells were incubated shaking for one hour at 30° C. Cells were then spun down and re-suspended in 1 M sorbitol at dilutions of 10⁻⁶, 10⁻⁷, and 10⁻⁸, and plated on glucose dropout media lacking leucine or tryptophan. Colonies were counted after three days growth to measure number of transformants.

### Example 8: Isolation of Affinity Matured 20E6 Variants by Yeast Surface Display

[0803] The yeast libraries were selected against a low concentration of biotinylated human and/or cyno LAP-TGFβ1-Fc fusion protein by magnetic-then fluorescence-activated cell sorting. The yeast libraries were exposed to different biotinylated LAP-TGFβ1-Fc antigen concentrations under different time and temperature conditions.

[0804] Fab expression was monitored by a goat F(ab′)2 anti-human kappa-Alexa Fluor 647 antibody (Southern Biotech). Antigen binding was monitored by R-Phycoerythrin conjugated Neutravidin (Sigma) as detection reagent. All samples were analyzed by flow cytometry using a FACS Aria III cytometer and FACS Diva software.

[0805] The optimal Ag binding conditions for library selections were identified by scouting experiments looked for conditions that appropriately discriminated library populations with different binding affinities towards LAP-TGFβ1-Fc. These conditions allowed detection of bound Ag and anti-human kappa expression to normalize the antigen-binding signal for expression. The libraries were sorted and collected for further rounds of analysis and enrichment. In the early rounds of selection, clones with the best antigen binding and expression in equilibrium conditions were collected. The antigen concentration was reduced in each successive round of selection and enrichment.

[0806] The libraries were last sorted by a kinetic selection for improved off-rate. Yeast cells displaying mutant 20E6 Fab were incubated in 300 pM biotinylated LAP-TGFβ1-Fc at 30° C. Cells were washed with phosphate buffered saline (PBS)-BSA buffer solution and then resuspended in a 100-fold excess of unbiotinylated LAP-TGFβ1-Fc protein and returned to 30° C. A collection of 20E6 variants with different affinity improvement were first sorted after 2 hours off-rate competition using 4 different sorting gates (P1 to P4 gates). See FIG. 4A and FIG. 5A. The highest affinity variant was sorted after 12 hours off-rate competition (compare FIG. 4A, FIG. 4B, FIG. 5A and FIG. 511).

### Example 9: Analysis of Affinity Matured 20E6 Variant Sequences from Different Off-Rate Selection Pressure

[0807] Yeast library outputs isolated from four 2-hour off-rate competition sorting gates and a 12-hour competition sorting gate were plated onto Petri dishes to form single colonies. Fifty randomly selected affinity matured yeast clones from each yeast library outputs were picked and their VH region and VL region were amplified by PCR for Sanger sequencing analysis. Individual 20E6 variant sequences from each output are listed in the following Tables 11-30 as indexed in Table 10. Tables 31-40 describe the consensus sequences of 20E6 variants from each selection output as well as amino acids that are represented at more than 3% of the available sequences at each CDR residue positions. It is expected that each identified amino acid change in the 20E6 CDRs alone or in combinations contribute to improved affinity to human LAP-TGFb1.

TABLE 10
Index of individual and consensus 20E6 variant VH and VL
sequences identified from the doping and TRIM libraries by
different sorting gates after 2 or 12 hours of off-rate competition

| | Off-rate | Doping library | | Trim library | |
|---|---|---|---|---|---|
| Sorting | duration | Sampled VH | Sampled VL | Sampled VH | Sampled VL |
| gate | competition | sequences | sequences | sequences | sequences |
| P1 | 2 hours | Tables 11, 31 | Tables 12, 31 | Tables 21, 36 | Tables 22, 36 |
| P2 | 2 hours | Tables 13, 32 | Tables 14, 32 | Tables 23, 37 | Tables 24, 37 |
| P3 | 2 hours | Tables 15, 33 | Tables 16, 33 | Tables 25, 38 | Tables 26, 38 |
| P4 | 2 hours | Tables 17, 34 | Tables 18, 34 | Tables 27, 39 | Tables 28, 39 |
| P1 | 12 hours | Tables 19, 35 | Tables 20, 35 | Tables 29, 40 | Tables 30, 40 |

TABLE 11
20E6 VH variants isolated from Doping Library
after 2 hour off-rate selection, P1 population

| Seq | |
|---|---|
| ID | |
| NO. | Amino acid sequence |
| 575 | EVQLVQSGAEVKKPGASVKVSCKASGYTFTNYYINWVRQAPGQGLEWMGRIDPQGGGSKYAQK |
| | FQGRATLTVDTSTSTAYMELSRLRSDDTAVYYCARWDYGGYFDVWGQGTLVTVSS |
| 576 | EVQLVQSGAEVKKPGASVKVSCKASGYTFTIYDTHWVRQAPGQGLEWMGRIDPQSGGIKYAQK |
| | FQGRATLTVDTSTSTAYMELSRLRSDDTAVYYCARWDYGGYFDVWGQGTLVTVSS |
| 577 | EVQLVQSGAEVKKPGASVKVSCKASGYTFTNYDIHWVRQAPGQGLEWMGRIDPQDGGIKYAQK |
| | FQGRATLTVDTSTSTAYMELSRLRSDDTAVYYCARWDYGGFFDVWGQGTLVTVSS |
| 578 | EVQLVQSGAEVKKPGASVKVSCKASGYTFTSYYLNWVRQAPGQGLEWMGRIDPWSGGIRYAQK |
| | FQGRATLTVDTSTSTAYMELSRLRSDDTAVYYCARWDYGGYFDVWGQGTLVTVSS |
| 579 | EVQLVQSGAEVKKPGASVKVSCKASGYTFTSYFMNWVRQAPGQGLEWMGRIDPQSGGSKYAQK |
| | FQGRATLTVDTSTSTAYMELSRLRSDDTAVYYCARWDYGGYFDVWGQGTLVTVSS |
| 580 | EVQLVQSGAEVKKPGASVKVSCKASGYTFTRYWISWVRQAPGQGLEWMGRIDPQSGGSRYAQK |
| | FQGRATLTVDTSTSTAYMELSRLRSDDTAVYYCARWDYGGYFDVWGQGTLVTVSS |
| 581 | EVQLVQSGAEVKKPGASVKVSCKASGYTFTSYLMQWVRQAPGQGLEWMGRIDPQSGGVKYAQK |
| | FQGRATLTVDTSTSTAYMELSRLRSDDTAVYYCARWDYGGYFDVWGQGTLVTVSS |
| 582 | EVQLVQSGAEVKKPGASVKVSCKASGYTFTSYWMAWVRQAPGQGLEWMGRIDPSDGGDRYAQK |
| | FQGRATLTVDTSTSTAYMELSRLRSDDTAVYYCARWDYGGYFDVWGQGTLVTVSS |
| 583 | EVQLVQSGAEVKKPGASVKVSCKASGYTFTSYWMQWVRQAPGQGLEWMGRIDPQDGGSKYAQK |
| | FQGRATLTVDTSTSTAYMELSRLRSDDTAVYYCARWDYGGYFDVWGQGTLVTVSS |
| 584 | EVQLVQSGAEVKKPGASVKVSCKASGYTFTSYFMNWVRQAPGQGLEWMGRIDPDRGGSKYAQK |
| | FQGRATLTVDTSTSTAYMELSRLRSDDTAVYYCARWHEGGYFDVWGQGTLVTVSS |
| 585 | EVQLVQSGAEVKKPGASVKVSCKASGYTFTSYLMQWVRQAPGQGLEWMGRIDPQLGDIKYAQK |
| | FQGRATLTMDTSTSTAYMELSRLRSDDTAVYYCARWDYGGYFDVWGQGTLVTVSS |
| 586 | EVQLVQSGAEVKKPGASVKVSCKASGYTFTSYWIQWVRQAPGQGLEWMGRIDPQSGGSKYAQK |
| | FQGRATLTVDTSTSTAYMELSRLRSDDTAVYYCARWDYGGYFDVWGQGTLVTVSS |
| 587 | EVQLVQSGAEVKKPGASVKVSCKASGYTFTRYYMNWVRQAPGQGLEWMGRIDPQSGGVKYAQK |
| | FQGRATLTVDTSTSTAYMELSRLRSDDTAVYYCARWDYGGYFDVWGQGTLVTVSS |
| 588 | EVQLVQSGAEVKKPGASVKVSCKASGYTFTRYLMQWVRQAPGQGLEWMGRIDPESGGVKYAQK |
| | FQGRATLTVDTSTSTAYMELSRLRSDDTAVYYCARWDYGGYFDVWGQGTLVTVSS |
| 589 | EVQLVQSGAEVKKPGASVKVSCKASGYTFTMYWMQWVRQAPGQGLEWMGRIDPISGGSKYAQK |
| | FQGRATLTVDTSTSTAYMELSRLRSDDTAVYYCARWDYGGYFDVWGQGTLVTVSS |
| 590 | EVQLVQSGAEVKKPGASVKVSCKASGYTFTSYWMQWVRQAPGQGLEWMGRIDPQNGGFKYAQK |
| | FQGRATLTVDTSTSTAYMELSRLRSDDTAVYYCARWDYGGYFDVWGQGTLVTVSS |
| 591 | EVQLVQSGAEVKKPGASVKVSCKASGYTFTNYYMAWVRQAPGQGLEWMGRIDPTSGGVKYAQK |
| | FQGRATLTVDTSTSTAYMELSRLRSDDTAVYYCARWDYGGYFDVWGHGTLVTVSS |
| 592 | EVQLVQSGAEVKKPGASVKVSCKASGYTFTRYYIQWVRQAPGQGLEWMGRIDPQDGDIKYAQK |
| | FQGRATLTVDTSTSTAYMELSRLRSDDTAVYYCARWDWGGYFDVWGQGTLVTVSS |
| 593 | EVQLVQSGAEVKKPGASVKVSCKASGYTFTSYLMGWVRQAPGQGLEWMGRIDPQSGGFKYAQK |
| | FQGRATLTVDTSTSTAYMELSRLRSDDTAVYYCARWEWGGQFDVWGQGTLVTVSS |
| 594 | EVQLVQSGAEVKKPGASVKVSCKASGYTFTRYLMHWVRQAPGQGLEWMGRIDPQNGGIRYAQK |
| | FQGRATLTVDTSTSTAYMELSRLRSDDTAVYYCARWDYGGYFDVWGQGTLVTVSS |
| 595 | EVQLVQSGAEVKKPGASVKVSCKASGYTFTSYYLNWVRQAPGQGLEWMGRIDPLGGGIRYAQK |
| | FQGRATLTVDTSTSTAYMELSRLRSDDTAVYYCARWDYGGYFDVWGQGTLVTVSS |
| 596 | EVQLVQSGAEVKKPGASVKVSCKASGYTFTTYWINWVRQAPGQGLEWMGRIDPLSGGVKYAQK |
| | FQGRATLTVDTSTSTAYMELSRLRSDDTAVYYCARWDYGGYFDVWGQGTLVTVSS |
| 597 | EVQLVQSGAEVKKPGASVKVSCKASGYTFTNYDMHWVRQAPGQGLEWMGRIDPQRGGILYAQK |
| | FQGRATLTVDTSTSTAYMELSRLRSDDTAVYYCARWDYGGYFDVWGQGTLVTVSS |
| 598 | EVQLVQSGAEVKKPGASVKVSCKASGYTFTTYDMHWVRQAPGQGLEWMGRIDPQAGDSIYAQK |
| | FQGRATLTVDTSTSTAYMELSRLRSDDTAVYYCARWDYGGYFDVWGQGTLVTVSS |
| 599 | EVQLVQSGAEVKKPGASVKVSCKASGYTFTRYYMNWVRQAPGQGLEWMGRIDPESGRFIYAQK |
| | FQGRATLTVDTSTSTAYMELSRLRSDDTAVYYCARWDYGGYFDVWGQGTLVTVSS |
| 600 | EVQLVQSGAEVKKPGASVKVSCKASGYTFTSYYLNWVRQAPGQGLEWMGRIDPQSGGSKYAQK |
| | FQGRATLTVDTSTSTAYMELSRLRSDDTAVYYCARWDYGGYFDVWGQGTLVTVSS |
| 601 | EVQLVQSGAEVKKPGASVKVSCKASGYTFTSYYMCWVRQAPGQGLEWMGRIDPQSGGVKYAQK |
| | FQGRATLTVDTSTSTAYMELSRLRSDDTAVYYCARWDYGGYFDVWGQGTLVTVSS |
| 602 | EVQLVQSGAEVKKPGASVKVSCKASGYTFTRYLMNWVRQAPGQGLEWMGRIDPEDGGCKYAQK |
| | FQGRATLTVDTSTSTAYMELSRLRSDDTAVYYCARWDYGGYFDVWGQGTLVTVSS |
| 603 | EVQLVQSGAEVKKPGASVKVSCKASGYTFTKYLIQWVRQAPGQGLEWMGRIDPEDGGIIYAQK |
| | FQGRATLTVDTSTSTAYMELSRLRSDDTAVYYCARWDYGGQFDVWGQGTLVTVSS |
| 604 | EVQLVQSGAEVKKPGASVKVSCKASGYTFTSYCMNWVRQAPGQGLEWMGRIDPHSGGVKYAQK |
| | FQGRATLTVDTSTSTAYMELSRLRSDDTAVYYCARWDWGGYFDVWGQGTLVTVSS |
| 605 | EVQLVQSGAEVKKPGASVKVSCKASGYTFTRYYMQWVRQAPGQGLEWMGRIDPESGGAKYAQK |
| | FQGRATLTVDTSTSTAYMELSRLRSDDTAVYYCARWDYGGYFDVWGQGTLVTVSS |
| 606 | EVQLVQSGAEVKKPGASVKVSCKASGYTFTHYYMQWVRQAPGQGLEWMGRIDPPSGDVRYAQK |
| | FQGRATLTVDTSTSTAYMELSRLRSDDTAVYYCARWDWGGYFDVWGQGTLVTVSS |
| 607 | EVQLVQSGAEVKKPGASVKVSCKASGYTFTSYWMQWVRQAPGQGLEWMGRIDPLIGDFKYAQK |
| | FQGRATLTVDTSTSTAYMELSRLRSDDTAVYYCARWDYGGYFDVWGQGTLVTVSS |
| 608 | EVOLVQSGAEVKKPGASVKVSCKASGYTFTRYFMNWVRQAPGQGLEWMGRIDPQEGGIKYAQK |
| | FQGRATLTVDTSTSTAYMELSRLRSDDTAVYYCARWDYGGYFDVWGQGTLVTVSS |
| 609 | EVQLVQSGAEVKKPGASVKVSCKASGYTFTSYDMHWVRQAPGQGLEWMGRIDPQSGGIKYAQK |
| | FQGRATLTVDTSTSTAYMELSRLRSDDTAVYYCARWDWGGYFDVWGQGTLVTVSS |
| 610 | EVQLVQSGAEVKKPGASVKVSCKASGYTFTFYDMHWVRQAPGQGLEWMGRIDPQSGGVKYAQK |
| | FQGRATLTVDTSTSTAYMELSRLRSDDTAVYYCARWDYGGYFDVWGQGTLVTVSS |
| 611 | EVQLVQSGAEVKKPGASVKVSCKASGYTFTRYWLQWVRQAPGQGLEWMGRIDPQIGEFKYAQK |
| | FQGRATLTVDTSTSTAYMELSRLRSDDTAVYYCARWDYGGYFDVWGQGTLVTVSS |
| 612 | EVQLVQSGAEVKKPGASVKVSCKASGYTFTNYDMHWVRQAPGQGLEWMGRIDPESGGIKYAQK |
| | FQGRATLTVDTSTSTAYMELSRLRSDDTAVYYCARWDYGGYFDVWGQGTLVTVSS |
| 613 | EVQLVQSGAEVKKPGASVKVSCKASGYTFTSYWMQWVRQAPGQGLEWMGRIDPQSGGNRYAQK |
| | FQGRATLTVDTSTSTAYVELSRLRSDDTAVYYCARWDYGGYFDVWGQGTLVTVSS |
| 614 | EVQLVQSGAEVKKPGASVKVSCKASGYTFTSYDMHWVRQAPGQGLEWMGRIDPQSGGVKYAQK |
| | FQGRATLTVDTSTSTAYMELSRLRSDDTAVYYCARWDYGGYFDVWGQGTLVTVSS |
| 615 | EVQLVQSGAEVKKPGASVKVSCKASGYTFTGYLMQWVRQAPGQGLEWMGRIDPQSGGIKYAQK |
| | FQGRATLTVDTSTSTAYMELSRLRSDDTAVYYCARWDYGGYFDVWGQGTLVTVSS |
| 616 | EVQLVQSGAEVKKPGASVKVSCKASGYTFTAYDIHWVRQAPGQGLEWMGRIDPQSGGIKYAQK |
| | FQGRATLTVDTSTSTAYMELSRLRSDDTAVYYCARWDYGGYFDVWGQGTLVTVSS |
| 617 | EVQLVQSGAEVKKPGASVKVSCKASGYTFTSYLMQWVRQAPGQGLEWMGRIDPDSGGILYAQK |
| | FQGRATLTVDTSTSTAYMELSRLRSDDTAVYYCARWDYGGYFDVWGQGTLVTVSS |
| 618 | EVQLVQSGAEVKKPGASVKVSCKASGYTFTSYYINWVRQAPGQGLEWMGRIDPDSGGFKYAQK |
| | FQGRATLTVDTSTSTAYMELSRLRSDDTAVYYCARWDYGGYFDVWGQGTLVTVSS |
| 619 | EVQLVQSGAEVKKPGASVKVSCKASGYTFTRYWMQWVRQAPGQGLEWMGRIDPQDGGIKYAQK |
| | FQGRATLTVDTSTSTAYMELSRLRSDDTAVYYCARFDYGGYFDVWGQGTLVTVSS |
| 620 | EVQLVQSGAEVKKPGASVKVSCKASGYTFTSYLLHWVRQAPGQGLEWMGRIDPEDGGIIYAQK |
| | FQGRATLTVDTSTSTAYMELSRLRSDDTAVYYCARWDYGGYFDVWGQGTLVTVSS |
| 621 | EVQLVQSGAEVKKPGASVKVSCKASGYTFTRYLMNWVRQAPGQGLEWMGRIDPLDGDIKYAQK |
| | FQGRATLTVDTSTSTAYMELSRLRSDDTAVYYCARWDYGGYFDVWGQGTLVTVSS |
| 622 | EVQLVQSGAEVKKPGASVKVSCKASGYTETRYYMSWVRQAPGQGLEWMGRIDPESGGIKYAQK |
| | FQGRATLTVDTSTSTAYMELSRLRSDDTAVYYCARWDYGGYFDVWGQGTLVTVSS |

TABLE 12
20E6 VL variants isolated from Doping Library after 2 hour off-rate selection,
P1 population

| Seq | |
|---|---|
| ID | |
| NO. | Amino acid sequence |
| 623 | DIQMTQSPSSLSASVGDRVTITCRASQDIWYYLNWYQQKPGKAVKLLIYYTSRLETGVPSRFS |
| | GSGSGTDYTLTISSLQPEDFATYFCQQGDTLPWTFGQGTKLEIK |
| 624 | DIQMTQSPSSLSASVGDRVTITCRASQDIWNYLNWYQQKPGKAVKLLIYYTSLLHSGVPSRFS |
| | GSGSGTDYTLTISSLQPEDFATYFCQQGDALPWTFGQGTKLEIK |
| 625 | DIQMTQSPSSLSASVGDRVTITCRASQDIWNYLNWYQQKPGKAVKLLIYYTSSLETGVPSRFS |
| | GSGSGTDYTLTISSLQPEDFATYFCQQGDTLPWTFGQGTKLEIK |
| 626 | DIQMTQSPSSLSASVGDRVTITCRASQDIWHYLNWYQQKPGKAVKLLIYYTSMLETGVPSRFS |
| | GSGSGTDYTLTISSLOPEDFATYFCQQGDTIPWTFGQGTKLEIK |
| 627 | DIQMTQSPSSLSASVGDRVTITCRASQDIWNYLNWYQQKPGKAVKLLIYYSSMLETGVPSRFS |
| | GSGSGTDYTLTISSLQPEDFATYFCQQGDILPWTFGQGTKLEIK |
| 628 | DIQMTQSPSSLSASVGDRVTITCRASQDIWHYLNWYQQKPGKAVKLLIYYTSCLETGVPSRFS |
| | GSGSGTDYTLTISSLOPEDFATYFCQQGDTLPWTFGQGTKLEIK |
| 629 | DIQMTQSPSSLSASVGDRVTITCRASQDIWNYLNWYQQKPGKAVKLLIYYTSRLETGVPSRFS |
| | GSGSGTDYTLTISSLQPEDFATYFCQQGDILPWTFGQGTELEIK |
| 630 | DIQMTQSPSSLSASVGDRVTITCRASQDIWNYLNWYQQKPGKAVKLLIYYTSRLHSGVPSRFS |
| | GSGSGTDYTLTISSLQPEDFATYFCQQGDTLPWTFGQGTKLEIK |
| 631 | DIQMTQSPSSLSASVGDRVTITCRASQDIWNYLNWYQQKPGKAVKLLIYYTSGLETGVPSRFS |
| | GSGSGTDYTLTISSLQPEDFATYFCQQGDTIPWTFGQGTKLEIK |
| 632 | DIQMTQSPSSLSASVGDRVTITCRASQDIWHYLNWYQQKPGKAVKLLIYYTSRLETGVPSRFS |
| | GSGSGTDYTLTISSLQPEDFATYFCQQGDILPWTFGQGTKLEIK |
| 633 | DIQMTQSPSSLSASVGDRVTITCRASQDIWYYLNWYQQKPGKAVKLLIYYTSGLETGVPSRFS |
| | GSGSGTDYTLTISSLQPEDFATYFCQQGDTLPWTFGQGTKLEIK |
| 634 | DIQMTQSPSSLSASVGDRVTITCRASQDIWNYLNWYQQKPGKAVKLLIYYTSRLETGVPSRFS |
| | GSGSGTDYTLTISSLQPEDFATYFCQQGDALPWTFGQGTKLEIK |
| 635 | DIQMTQSPSSLSASVGDRVTITCRASQDIWNYLNWYQQKPGKAVKLLIYYTSGLETGVPSRFS |
| | GSGSGTDYTLTISSLQPEDFATYFCQQGDTLPWTFGQGTKLEIK |
| 636 | DIQMTQSPSSLSASVGDRVTITCRASQDIYKYLNWYQQKPGKAVKLLIYYTSGLETGVPSRFS |
| | GSGSGTDYTLTISSLQPEDFATYFCQQGDTLPWTFGQGTKLEIK |
| 637 | DIQMTQSPSSLSASVGDRVTITCRASQDIWNYLNWYQQKPGKAVKLLIYYTSGLETGVPSRFS |
| | GSGSGTDYTLTISSLQPEDFATYFCQQGDNLPWTFGQGTKLEIK |
| 638 | DIQMTQSPSSLSASVGDRVTITCRASQDIWNYLNWYQQKPGKAVKLLIYYSSVLETGVPSRFS |
| | GSGSGTDYTLTISSLQPEDFATYFCQQGDTLPWTFGQGTKLEIK |
| 639 | DIQMTQSPSSLSASVGDRVTITCRASQDIWNYLNWYQQKPGKAVKLLIYYTSNLETGVPSRFS |
| | GSGSGTDYTLTISSLQPEDFATYFCQQGDTLPWTFGQGTKLEIK |
| 640 | DIQMTQSPSSLSASVGDRVTITCRASQDIWSYLNWYQQKPGKAVKLLIYYTSGLETGVPSRFS |
| | GSGSGTDYTLTISSLQPEDFATYFCQQGDTLPWTFGQGTKLEIK |
| 641 | DIQMTQSPSSLSASVGDRVTITCRASQDIWNYLNWYQQKPGKAVKLLIYYTSILETGVPSRFS |
| | GSGSGTDYTLTISSLQPEDFATYFCQQGDTLPWTFGQGTKLEIK |
| 642 | DIQMTQSPSSLSASVGDRVTITCRASQDIWNYLNWYQQKPGKAVKLLIYYTSMLETGVPSRFS |
| | GSGSGTDYTLTISSLQPEDFATYFCQQGDTIPWTFGQGTKLEIK |
| 643 | DIQMTQSPSSLSASVGDRVTITCRASQDIWNYLNWYQQKPGKAVKLLIYYTSSLETGVPSRFS |
| | GSGSGTDYTLTISSLQPEDFATYFCQQGDILPWTFGQGTKLEIK |
| 644 | DIQMTQSPSSLSASVGDRVTITCRASQDIWNYLNWYQQKPGKAVKLLIYYTSRLETGVPSRFS |
| | GSGSGTDYTLTISSLQPEDFATYFCQQGDTLPWTFGQGTKLEIK |
| 645 | DIQMTQSPSSLSASVGDRVTITCRASQDIWSYLNWYQQKPGKAVKLLIYYTSRLHSGVPSRFS |
| | GSGSGTDYTLTISSLQPEDFATYFCQQGDALPWTFGQGTKLEIK |
| 646 | DIQMTQSPSSLSASVGDRVTITCRASQDIWNYLNWYQQKPGKAVKLLIYYTSRLETGVPSRFS |
| | GSGSGTDYTLTISSLOPEDFATYFCQQGDLLPWTFGQGTKLEIK |
| 647 | DIQMTQSPSSLSASVGDRVTITCRASQDIYNYLNWYQQKPGKAVKLLIYYTSRLETGVPSRFS |
| | GSGSGTDYTLTISSLQPEDFATYFCQQGDMLPWTFGQGTKLEIK |
| 648 | DIQMTQSPSSLSASVGDRVTITCRASQDIWNYLNWYQQKPGKAVKLLIYYTSSLETGVPSRFS |
| | GSGSGTDYTLTISSLQPEDFATYFCQQGDIMPWTFGQGTKLEIK |
| 649 | DIQMTQSPSSLSASVGDRVTITCRASQDIWNYLNWYQQKPGKAVKLLIYYTSTLETGVPSRFS |
| | GSGSGTDYTLTISSLQPEDFATYFCQQGDMLPWTFGQGTKLEIK |
| 650 | DIQMTQSPSSLSASVGDRVTITCRASQDIWSYLNWYQQKPGKAVKLLIYYTSGLHSGVPSRFS |
| | GSGSGTDYTLTISSLQPEDFATYFCQQGDALPWTFGQGTKLEIK |
| 651 | DIQMTQSPSSLSASVGDRVTITCRASQDIWNYLNWYQQKPGKAVKLLIYYTSILHSGVPSRFS |
| | GSGSGTDYTLTISSLQPEDFATYFCQQGDTLPWTFGQGTKLEIK |
| 652 | DIQMTQSPSSLSASVGDRVTITCRASQDIWNYLNWYQQKPGKAVKLLIYYTSWLETGVPSRFS |
| | GSGSGTDYTLTISSLQPEDFATYFCQQGDTLPWTFGQGTKLEIK |
| 653 | DIQMTQSPSSLSASVGDRVTITCRASQDIWNYLNWYQQKPGKAVKLLIYYTSGLHSGVPSRFS |
| | GSGSGTDYTLTISSLQPEDFATYFCQQGDSLPWTFGQGTKLEIK |
| 654 | DIQMTQSPSSLSASVGDRVTITCRASQDIWNYLNWYQQKPGKAVKLLIYYTSLLHSGVPSRFS |
| | GSGSGTDYTLTISSLQPEDFATYFCQQGDTLPWTFGQGTKLEIK |
| 655 | DIQMTQSPSSLSASVGDRVTITCRASQDIWHYLNWYQQKPGKAVKLLIYYTSLLETGVPSRFS |
| | GSGSGTDYTLTISSLQPEDFATYFCQQGDTLPWTFGQGTKLEIK |
| 656 | DIQMTQSPSSLSASVGDRVTITCRASQDIWNYLNWYQQKPGKAVKLLIYYTSMLETGVPSRFS |
| | GSGSGTDYTLTISSLQPEDFATYFCQQGDMLPWTFGQGTKLEIK |
| 657 | DIQMTQSPSSLSASVGDRVTITCRASQDIWSYLNWYQQKPGKAVKLLIYYTSRLHSGVPSRFS |
| | GSGSGTDYTLTISSLQPEDFATYFCQQGDTLPWTFGQGTKLEIK |
| 658 | DIQMTQSPSSLSASVGDRVTITCRASQDIWNYLNWYQQKPGKAVKLLIYYTSGLETGVPSRFS |
| | GSGSGTDYTLTISSLOPEDFATYFCQQGDALPWTFGQGTKLEIK |
| 659 | DIQMTQSPSSLSASVGDRVTITCRASQDIWNYLNWYQQKPGKAVKLLIYYTSMLETGVPSRFS |
| | GSGSGTDYTLTISSLQPEDFATYFCQQGDTLPWTFGQGTKLEIK |
| 660 | DIQMTQSPSSLSASVGDRVTITCRASQDIWSYLNWYQQKPGKAVKLLIYYTSWLETGVPSRFS |
| | GSGSGTDYTLTISSLQPEDFATYFCQQGDTLPWTFGQGTKLEIK |

TABLE 13
20E6 VH variants isolated from Doping Library after 2 hour off-rate selection, P2
population

| Seq | |
|---|---|
| ID | |
| NO . | Amino acid sequence |
| 661 | EVQLVQSGAEVKKPGASVKVSCKASGYTFTRYDIHWVRQAPGQGLEWMGRIDPQSGGSKYAQK |
| | FQGRATLTVDTSTSTAYMELSRLRSDDTAVYYCARWDYGGYFDVWGQGTLVTVSS |
| 662 | EVQLVQSGAEVKKPGASVKVSCKASGYTFTRYDIHWVRQAPGQGLEWMGRIDPQSGGTKYAQK |
| | FQGRATLTVDTSTSTAYMELSRLRSDDTAVYYCARWDYGGYFDVWGQGTLVTVSS |
| 663 | EVQLVQSGAEVKKPGASVKVSCKASGYTFTSYSMHWVRQAPGQGLEWMGRIDPQDGDIKYAQK |
| | FQGRATLTVDTSTSTAYMELSRLRSDDTAVYYCARWDYGGYFDVWGQGTLVTVSS |
| 664 | EVQLVQSGAEVKKPGASVKVSCKASGYTFTSYDVHWVRQAPGQGLEWMGRIDPDGGDIKYAQK |
| | FQGRATLTVDTSTSTAYMELSRLRSDDTAVYYCARWDYGGYFDVWGQGTLVTVSS |
| 665 | EVQLVQSGAEVKKPGASVKVSCKASGYTFTSYLMAWVRQAPGQGLEWMGRIDPQSGGIKYAQK |
| | FQGRATLTVDTSTSTAYMELSRLRSDDTAVYYCARWDYGGQFDVWGQGTLVTVSS |
| 666 | EVQLVQSGAEVKKPGASVKVSCKASGYTFTSYYMNWVRQAPGQGLEWMGRIDPLSGGIKYAQK |
| | FQGRATLTVDTSTSTAYMELSRLRSDDTAVYYCARYDYGGFFDVWGQGTLVTVSS |
| 667 | EVQLVQSGAEVKKPGASVKVSCKASGYTFTSYDLHWVRQAPGQGLEWMGRIDPQSGGIKYAQK |
| | FQGRATLTVDTSTSTAYMELSRLRSDDTAVYYCARWDYGGYFDVWGQGTLVTVSS |
| 668 | EVQLVQSGAEVKKPGASVKVSCKASGYTFTSYWMQWVRQAPGQGLEWMGRIDPQSGGILYAQK |
| | FQGRATLTVDTSTSTAYMELSRLRSDDTAVYYCARWDYGGYFDVWGQGTLVTVSS |
| 669 | EVQLVQSGAEVKKPGASVKVSCKASGYTFTRYDLYWVRQAPGQGLEWMGRIDPEGGGVKYAQK |
| | FQGRATLTVDTSTSTAYMELSRLRSDDTAVYYCARWDYGGYFDVWGQGTLVTVSS |
| 670 | EVQLVQSGAEVKKPGASVKVSCKASGYTFTSYFMQWVRQAPGQGLEWMGRIDPQSGGIKYAQK |
| | FQGRATLTVDTSTSTAYMELSKLRSDDTAVYYCARWDYGGYFDVWGQGTLVTVSS |
| 671 | EVQLVQSGAEVKKPGASVKVSCKASGYTFTSYYISWVRQAPGQGLEWMGRIDPNSGGIKYAQK |
| | FQGRATLTVDTSTSTAYMELSRLRSDDTAVYYCARYDHGGYFDVWGQGTLVTVSS |
| 672 | EVQLVQSGAEVKKPGASVKVSCKASGYTFTSYFLNWVRQAPGQGLEWMGRIDPQDGGIKYAQK |
| | FQGRATLTVDTSTSTAYMELSRLRSDDTAVYYCARWDYGGYFDVWGQGTLVTVSS |
| 673 | EVQLVQSGAEVKKPGASVKVSCKASGYTFTRYLMQWVRQAPGQGLEWMGRIDPQSGGIRYAQK |
| | FQGRATLTVDTSTSTAYMELSRLRSDDTAVYYCARWDYGGYFDVWGQGTLVTVSS |
| 674 | EVQLVQSGAEVKKPGASVKVSCKASGYTFTAYDIHWVRQAPGQGLEWMGRIDPQSGGIKYAQK |
| | FQGRATLTVDTSTSTAYMELSRLRSDDTAVYYCARWDYGGYFDVWGQGTLVTVSS |
| 675 | EVQLVQSGAEVKKPGASVKVSCKASGYTFTSYYINWVRQAPGQGLEWMGRIDPDSGGFKYAQK |
| | FQGRATLTVDTSTSTAYMELSRLRSDDTAVYYCARWDYGGYFDVWGQGTLVTVSS |
| 676 | EVQLVQSGAEVKKPGASVKVSCKASGYTFTSYDLHWVRQAPGQGLEWMGRIDPQSGGILYAQK |
| | FQGRATLTVDTSTSTAYMELSRLRSDDTAVYYCARWDYGGFFDVWGQGTLVTVSS |
| 677 | EVQLVQSGAEVKKPGASVKVSCKASGYTFTRYDVHWVRQAPGQGLEWMGRIDPQSGGKKYAQK |
| | FQGRATLTVDTSTSTAYMELSRLRSDDTAVYYCARWDYGGYFDVWGQGTLVTVSS |
| 678 | EVQLVQSGAEVKKPGASVKVSCKASGYTFTSYLMQWVRQAPGQGLEWMGRIDPQSGGIIYAQK |
| | FQGRATLTVDTSTSTAYMELSRLRSDDTAVYYCARWDYGGYFDVWGQGTLVTVSS |
| 679 | EVQLVQSGAEVKKPGASVKVSCKASGYTFTRYLMQWVRQAPGQGLEWMGRIDPQSGGIIYAQK |
| | FQGRATLTVDTSTSTAYMELSRLRSDDTAVYYCARWDYGGYFDVWGQGTLVTVSS |
| 680 | EVQLVQSGAEVKKPGASVKVSCKASGYTFTRYLMQWVRQAPGQGLEWMGRIDPQSGGVIYAQK |
| | FQGRATLTVDTSTSTAYMELSRLRSDDTAVYYCARWDFGGYFDVWGQGTLVTVSS |
| 681 | EVQLVQSGAEVKKPGASVKVSCKASGYTFTSYWMQWVRQAPGQGLEWMGRIDPPSGGVIYAQK |
| | FQGRATLTVDTSTSTAYMELSRLRSDDTAVYYCARWDYGGYFDVWGQGTLVTVSS |
| 682 | EVOLVQSGAEVKKPGASVKVSCKASGYTFTAYLMQWVRQAPGQGLEWMGRIDPEDGGVKYAQK |
| | FQGRATLTVDTSTSTAYMELSRLRSDDTAVYYCARWDYGGYFDVWGQGTLVTVSS |
| 683 | EVQLVQSGAEVKKPGASVKVSCKASGYTFTSYFMNWVRQAPGQGLEWMGRIDPQSGGIKYAQK |
| | FQGRATLTVDTSTSTAYMELSRLRSDDTAVYYCARWDYGGYFDVWGQGTLVTVSS |
| 684 | EVQLVQSGAEVKKPGASVKVSCKASGYTFTSYWIQWVRQAPGQGLEWMGRIDPEDGGIKYAQK |
| | FQGRATLTVDTSTSTAYMELSRLRSDDTAVYYCARWDYGGYFDVWGQGTLVTVSS |
| 685 | EVQLVQSGAEVKKPGASVKVSCKASGYTFTSYWMQWVRQAPGQGLEWMGRIDPHDGGIKYAQK |
| | FQGRATLTVDTSTSTAYMELSRLRSDDTAVYYCARWDYGGYFDVWGQGTLVTVSS |

TABLE 14
20E6 VL variants isolated from Doping Library after 2 hour off-rate selection,
P2 population

| Seq | |
|---|---|
| ID | |
| NO. | Amino acid sequence |
| 686 | DIQMTQSPSSLSASVGDRVTITCRASQDISNYLNWYQQKPGKAVKLLIYYTSMLETGVPSRFS |
| | GSGSGTDYTLTISSLQPEDFATYFCQQGDALPWTFGRGTKLEIK |
| 687 | DIQMTQSPSSLSASVGDRVTITCRASQDIYNYLNWYQQKPGKAVKLLIYYTSGLETGVPSRFS |
| | GSGSGTDYTLTISSLQPEDFATYFCQQGDTLPWTFGQGTKLEIK |
| 688 | DIQMTQSPSSLSASVGDRVTITCRASQDIYNYLNWYQQKPGKAVKLLIYYTSILETGVPSRFS |
| | GSGSGTDYTLTISSLQPEDFATYFCQQGDTLPWTFGQGTKLEIK |
| 689 | DIQMTQSPSSLSASVGDRVTITCRASQDIYNYLNWYQQKPGKAVKLLIYYTSRLETGVPSRFS |
| | GSGSGTDYTLTISSLQPEDFATYFCQQGDILPWTFGQGTKLEIK |
| 690 | DIQMTQSPSSLSASVGDRVTITCRASQDIFNYLNWYQQKPGKAVKLLIYYASTLHSGVPSRFS |
| | GSGSGTDYTLTISSLQPEDFATYFCQQGDTLPWTFGQGTKLEIK |
| 691 | DIQMTQSPSSLSASVGDRVTITCRASQDIYSYLNWYQQKPGKAVKLLIYYTSRLHSGVPSRFS |
| | GSGSGTDYTLTISSLQPEDFATYFCQQGDQLPWTFGQGTKLEIK |
| 692 | DIQMTQSPSSLSASVGDRVTITCRASQDIYNYLNWYQQKPGKAVKLLIYYTSKLHSGVPSRFS |
| | GSGSGTDYTLTISSLQPEDFATYFCQQGDILPWTFGQGTKLEIK |
| 693 | DIQMTQSPSSLSASVGDRVTITCRASQDIYNYLNWYQQKPGKAVKLLIYYTSQLETGVPSRFS |
| | GSGSGTDYTLTISSLQPEDFATYFCQQGDTLPWTFGQGTKLEIK |
| 694 | DIQMTQSPSSLSASVGDRVTITCRASQDIYNYLNWYQQKPGKAVKLLIYYTSRLETGVPSRFS |
| | GSGSGTDYTLTISSLQPEDFATYFCQQGDTLPWTFGQGTKLEIK |
| 695 | DIQMTQSPSSLSASVGDRVTITCRASQDIFHYLNWYQQKPGKAVKLLIYYTSELETGVPSRFS |
| | GSGSGTDYTLTISSLQPEDFATYFCQQGDTLPWTFGQGTKLEIK |
| 696 | DIQMTQSPSSLSASVGDRVTITCRASQDIYNYLNWYQQKPGKAVKLLIYYTSRLETGVPSRFS |
| | GSGSGTDYTLTISSLQPEDFATYFCQQGDSIPWTFGQGTKLEIK |
| 697 | DIQMTQSPSSLSASVGDRVTITCRASQDIYNYLNWYQQKPGKAVKLLIYYTSGLHSGVPSRFS |
| | GSGSGTDYTLTISSLQPEDFATYFCQQGDALPWTFGQGTKLEIK |
| 698 | DIQMTQSPSSLSASVGDRVTITCRASQDIYYYLNWYQQKPGKAVKLLIYYTSGLETGVPSRFS |
| | GSGSGTDYTLTISSLQPEDFATYFCQQGDTLPWTFGQGTKLEIK |
| 699 | DIQMTQSPSSLSASVGDRVTITCRASQDIFNYLNWYQQKPGKAVKLLIYYTSSLETGVPSRFS |
| | GSGSGTDYTLTISSLQPEDFATYFCQQGDSLPWTFGQGTKLEIK |
| 700 | DIQMTQSPSSLSASVGDRVTITCRASQDISNYLNWYQQKPGKAVKLLIYYTSMLETGVPSRFS |
| | GSGSGTDYTLTISSLQPEDFATYFCQQGDILPWTFGQGTKLEIK |
| 701 | DIQMTQSPSSLSASVGDRVTITCRASQDIANYLNWYQQKPGKAVKLLIYYTSMLETGVPSRFS |
| | GSGSGTDYTLTISSLQPEDFATYFCQQGETLPWTFGQGTKLEIK |
| 702 | DIQMTQSPSSLSASVGDRVTITCRASQDIFSYLNWYQQKPGKAVKLLIYYTSILETGVPSRFS |
| | GSGSGTDYTLTISSLQPEDFATYFCQQGDTLPWTFGQGTKLEIK |
| 703 | DIQMTQSPSSLSASVGDRVTITCRASQDIFNYLNWYQQKPGKAVKLLIYYTSRLETGVPSRFS |
| | GSGSGTDYTLTISSLQPEDFATYFCQQGDTLPWTFGQGTKLEIK |
| 704 | DIQMTQSPSSLSASVGDRVTITCRASQDIFNYLNWYQQKPGKAVKLLIYYTSSLETGVPSRFS |
| | GSGSGTDYTLTISSLQPEDFATYFCQQGDTLPWTFGQGTKLEIK |
| 705 | DIQMTQSPSSLSASVGDRVTITCRASQDIFNYLNWYQQKPGKAVKLLIYYTSRLETGVPSRFS |
| | GSGSGTDYTLTISSLQPEDFATYFCQQGDELPWTFGQGTKLEIK |
| 706 | DIQMTQSPSSLSASVGDRVTITCRASQDIYNYLNWYQQKPGKAVKLLIYYTSMLETGVPSRFS |
| | GSGSGTDYTLTISSLQPEDFATYFCQQGDTLPWTFGQGTKLEIK |
| 707 | DIQMTQSPSSLSASVGDRVTITCRASQDIANYLNWYQQKPGKAVKLLIYYTSILETGVPSRFS |
| | GSGSGTDYTLTISSLQPEDFATYFCQQGDTLPWTFGQGTKLEIK |
| 708 | DIQMTQSPSSLSASVGDRVTITCRASQDIYHYLNWYQQKPGKAVKLLIYYTSRLETGVPSRFS |
| | GSGSGTDYTLTISSLOPEDFATYFCQQGDTLPWTFGQGTKLEIK |
| 709 | DIQMTQSPSSLSASVGDRVTITCRASQDIANYLNWYQQKPGKAVKLLIYYTSMLETGVPSRFS |
| | GSGSGTDYTLTISSLQPEDFATYFCQQGDTLPWTFGQGTKLEIK |
| 710 | DIQMTQSPSSLSASVGDRVTITCRASQDIYNYLNWYQQKPGKAVKLLIYYSSMLETGVPSRFS |
| | GSGSGTDYTLTISSLQPEDFATYFCQQGDELPWTFGQGTKLEIK |
| 711 | DIQMTQSPSSLSASVGDRVTITCRASQDIYNYLNWYQQKPGKAVKLLIYYTSRLETGVPSRFS |
| | GSGSGTDYTLTISSLQPEDFATYFCQQGDIIPWTFGQGTKLEIK |

TABLE 15
20E6 VH variants isolated from Doping Library after 2 hour off-rate selection,
P3 population

| Seq | |
|---|---|
| ID | |
| NO. | Amino acid sequence |
| 712 | EVQLVQSEAEVKKPGASVKVSCKASGYTFTSYQLQWVRQAPGQGLEWMGRIDPHGGSTNYAQK |
| | FQGRATLTVDTSTSTAYMELSRLRSDDTAVYYCARWDYGGYFDVWGQGTLVTVSS |
| 713 | EVQLVQSGAEVKKPGASVKVSCKASGYTFTSYDMCWVRQAPGQGLEWMGRIDPQSGGIRYAQK |
| | FQGRATLTVDTSTSTAYMELSRLRSDDTAVYYCARWDFGGYFDVWGQGTLVTVSS |
| 714 | EVOLVQSGAEVKKPGASVKVSCKASGYTFTSYWMQWVRQAPGQGLEWMGRIDPQSGGIKYAQK |
| | FQGRATLTVDTSTSTAYMELSRLRSDDTAVYYCARWDYGGYFDVWGQGTLVTVSS |
| 715 | EVQLVQSGAEVKKPGASVKVSCKASGYTFTSYLMHWVRQAPGQGLEWMGRIDPRNGGIPYAQK |
| | FQGRATLTVDTSTSTAYMELSRLRSDDTAVYYCARWDYGGYFDVWGQGTLVTVSS |
| 716 | EVQLVQSGAEVKKPGASVKVSCKASGYTFTSYLLQWVRQAPGQGLEWMGRIDPQSGGNKYAQK |
| | FQGRATLTVDTSTSTAYMELSRLRSDDTAVYYCARWDFGGYFDVWGQGTLVTVSS |
| 717 | EVQLVQSGAEVKKPGASVKVSCKASGYTFTSYLMHWVRQAPGQGLEWMGRIDPQSGGFIYAQK |
| | FQGRATLTVDTSTSTAYMELSRLRSDDTAVYYCARYDHGGYFDVWGQGTLVTVSS |
| 718 | EVQLVQSGAEVKKPGASVKVSCKASGYTFTRYLMNWVRQAPGQGLEWMGRIDPPSGGVKYAQK |
| | FQGRATLTVDTSTSTAYMELSRLRSDDTAVYYCARWDYGGYFDVWGQGTLVTVSS |
| 719 | EVQLVQSGAEVKKPGASVKVSCKASGYTFTSYLLSWVRQAPGQGLEWMGRIDPDSGGIKYAQK |
| | FQGRATLTVDTSTSTAYMELSRLRSDDTAVYYCARWDYGGFFDVWGQGTLVTVSS |
| 720 | EVQLVQSGAEVKKPGASVKVSCKASGYTFTKYLMTWVRQAPGQGLEWMGRIDPQSGGIKYAQK |
| | FQGRATLTVDTSTSTAYMELSRLRSDDTAVYYCARWDYGGYFDVWGQGTLVTVSS |
| 721 | EVQLVQSGAEVKKPGASVKVSCKASGYTFTIYDMHWVRQAPGQGLEWMGRIDPQLGGIKYAQK |
| | FQGRATLTVDTSTSTAYMELSRLRSDDTAVYYCARWQWGGEFDVWGQGTLVTVSS |
| 722 | EVQLVQSGAEVKKPGASVKVSCKASGYTFTSYLMHWVRQAPGQGLEWMGRIDPQSGGIIYAQK |
| | FQGRATLTVDTSTSTAYMELSRLRSDDTAVYYCARWHFGGYFDVWGQGTLVTVSS |
| 723 | EVQLVOSGAEVKKPGASVKVSCKASGYTFTQYLMSWVRQAPGQGLEWMGRIDPQSGGIKYAQK |
| | FQGRATLTVDTSTSTAYMELSRLRSDDTAVYYCARWDYGGYFDVWGQGTLVTVSS |
| 724 | EVQLVQSGAEVKKPGASVKVSCKASGYTFTRYLLQWVRQAPGQGLEWMGRIDPQGGGIKYAQK |
| | FQGRATLTVDTSTSTAYMELSRLRSDDTAVYYCARWDYGGYFDVWGQGTLVTVSS |
| 725 | EVQLVQSGAEVKKPGASVKVSCKASGYTFTSYWMHWVRQAPGQGLEWMGRIDPVGGGTKYAQK |
| | FQGRATLTVDTSTSTAYMELSRLRSDDTAVYYCARWNYGGYFDVWGQGTLVTVSS |
| 726 | EVOLVQSGAEVKKPGASVKVSCKASGYTFTRYWMSWVRQAPGQGLEWMGRIDPQSGGIIYAQK |
| | FQGRATLTVDTSTSTAYMELSRLRSDDTAVYYCARWDWGGYFDVWGQGTLVTVSS |
| 727 | EVQLVQSGAEVKKPGASVKVSCKASGYTFTSYLMQWVRQAPGQGLEWMGRIDPRSGGILYAQK |
| | FQGRATLTVDTSTSTAYMELSRLRSDDTAVYYCARWNYGGYFDVWGQGTLVTVSS |
| 728 | EVQLVQSGAEVKKPGASVKVSCKASGYTFTSYLNHWVRQAPGQGLEWMGRIDPESGGSRYAQK |
| | FQGRATLTVDTSTSTAYMELSRLRSDDTAVYYCARWDHGGYFDVWGQGTLVTVSS |
| 729 | EVQLVQSGAEVKKPGASVKVSCKASGYTFTSYLMQWVRQAPGQGLEWMGRIDPRDGGINYAQK |
| | FQGRATLTVDTSTSTAYMELSRLRSDDTAVYYCARWDYGGYFDVWGQGTLVTVSS |
| 730 | EVOLVQSGAEVKKPGASVKVSCKASGYTFTRYWMQWVRQAPGQGLEWMGRIDPLSGGMKYAQK |
| | FQGRATLTVDTSTSTAYMELSRLRSDDTAVYYCARWNHGGYFDVWGQGTLVTVSS |
| 731 | EVQLVQSGAEVKKPGASVKVSCKASGYTFTSYWIQWVRQAPGQGLEWMGRIDPQSGGSKYAQK |
| | FQGRATLTVDTSTSTAYMELSRLRSDDTAVYYCARWDYGGYFDVWGQGTLVTVSS |
| 732 | EVQLVQSGAEVKKPGASVKVSCKASGYTFTNYLLHWVRQAPGQGLEWMGRIDPQSGDIKYAQK |
| | FQGRATLTVDTSTSTAYMELSRLRSDDTAVYYCARWDWGGYFDVWGQGTLVTVSS |
| 733 | EVQLVQSGAEVKKPGASVKVSCKASGYTFTSYWMHWVRQAPGQGLEWMGRIDPKNGGIIYAQK |
| | FQGRATLTVDTSTSTAYMELSRLRSDDTAVYYCARWDWGGFFDVWGQGTLVTVSS |
| 734 | EVQLVQSGAEVKKPGASVKVSCKASGYTFTSYDTNWVRQAPGQGLEWMGRIDPQNGGIKYAQK |
| | FQGRATLTVDTSTSTAYMELSRLRSDDTAVYYCARWDYGGYFDVWGQGTLVTVSS |
| 735 | EVQLVQSGAEVKKPGASVKVSCKASGYTFTGYLVSWVRQAPGQGLEWMGRIDPRSGGIIYAQK |
| | FQGRATLTVDTSTSTAYMELSRLRSDDTAVYYCARWDYGGYFDVWGQGTLVTVSS |
| 736 | EVQLVQSGAEVKKPGASVKVSCKASGYTFTNYLMQWVRQAPGQGLEWMGRIDPQIGGSRYAQK |
| | FQGRATLTVDTSTSTAYMELSRLRSDDTAVYYCARWDYGGYFDVWGQGTLVTVSS |
| 737 | EVQLVQSGAEVKKPGASVKVSCKASGYTFTRYDLQWVRQAPGQGLEWMGRIDPPSGGINYAQK |
| | FQGRATLTVDTSTSTAYMELSRLRSDDTAVYYCARWDYGGYFDVWGQGTLVTVSS |
| 738 | EVQLVQSGAEVKKPGASVKVSCKASGYTFTRYDMHWVRQAPGQGLEWMGRIDPSTGGIKYAQK |
| | FQGRATLTVDTSTSTAYMELSRLRSDDTAVYYCARWDYGGYFDVWGQGTLVTVSS |
| 739 | EVQLVQSGAEVKKPGASVKVSCKASGYTFTSYWMHWVRQAPGQGLEWMGRIDPLSGDVKYAQK |
| | FQGRATLTVDTSTSTAYMELSRLRSDDTAVYYCARWDYGGYFDVWGHGTLVTVSS |
| 740 | EVQLVQSGAEVKKPGASVKVSCKASGYTFTSYLISWVRQAPGQGLEWMGRIDPQSGGVKYAQK |
| | FQGRATLTVDTSTSTAYMELSRLRSDDTAVYYCARWDYGGYFDVWGQGTLVTVSS |
| 741 | EVQLVQSGAEVKKPGASVKVSCKASGYTFTSYWLQWVRQAPGQGLEWMGRIDPESGGIKYAQK |
| | FQGRATLTVDTSTSTAYMELSRLRSDDTAVYYCARWDYGGYFDVWGQGTLVTVSS |
| 742 | EVQLVQSGAEVKKPGASVKVSCKASGYTFTSYLVNWVRQAPGQGLEWMGRIDPQSGGIKYAQK |
| | FQGRATLTVDTSTSTAYMELSRLRSDDTAVYYCARWDYGGYFDVWGQGTLVTVSS |
| 743 | EVOLVQSGAEVKKPGASVKVSCKASGYTFTNYLMQWVRQAPGQGLEWMGRIDPYRGGSIYAQK |
| | FQGRATLTVDTSTSTAYMELSRLRSDDTAVYYCARWDYGGYFDVWGQGTLVTVSS |
| 744 | EVQLVQSGAEVKKPGASVKVSCKASGYTFTRYFMTWVRQAPGQGLEWMGRIDPQGGGIKYAQK |
| | FQGRATLTVDTSTSTAYMELSRLRSDDTAVYYCARWDYGGYFDVWGQGTLVTVSS |
| 745 | EVOLVQSGAEVKKPGASVKVSCKASGYTFTSYLLTWVRQAPGQGLEWMGRIDPESGGRKYAQK |
| | FQGRATLTVDTSTSTAYMELSRLRSDDTAVYYCARWDYGGFFDVWGQGTLVTVSS |
| 746 | EVQLVQSGAEVKKPGASVKVSCKASGYTFTSYDMHWVRQAPGQGLEWMGRIDPQSGGFKYAQK |
| | FQGRATLTVDTSTSTAYMELSRLRSDDTAVYYCARWDYGGYFDVWGQGTLVTVSS |
| 747 | EVQLVQSGAEVKKPGASVKVSCKASGYTFTNYLLQWVRQAPGQGLEWMGRIDPESGGIKYAQK |
| | FQGRATLTVDTSTSTAYMELSRLRSDDTAVYYCARWDYGGYFDVWGQGTLVTVSS |
| 748 | EVQLVQSGAEVKKPGASVKVSCKASGYTFTRYYLNWVRQAPGQGLEWMGRIDPQSGGIKYAQK |
| | FQGRATLTVDTSTSTAYMELSRLRSDDTAVYYCARWDYGGYFDVWGQGTLVTVSS |
| 749 | EVQLVQSGAEVKKPGASVKVSCKASGYTFTSYLMHWVRQAPGQGLEWMGRIDPQNGGIKYAQK |
| | FQGRATLTVDTSTSTAYMELSRLRSDDTAVYYCARWDYGGYFDVWGQGTLVTVSS |
| 750 | EVQLGQSGAEVKKPGASVKVSCKASGYTFTSYLMTWVRQAPGQGLEWMGRIDPLSGGIKYAQK |
| | FQGRATLTVDTSTSTAYMELSRLRSDDTAVYYCARWDYGGYFDVWGQGTLVTVSS |
| 751 | EVQLVQSGAEVKKPGASVKVSCKASGYTFTRYLLQWVRQAPGQGLEWMGRIDPDSGAIKYAQK |
| | FQGRAALTVDTSTSTAYMELSRLRSDDTAVYYCARWDYGGYFDVWGQGTLVTVSS |
| 752 | EVQLVQSGAEVKKPGASVKVSCKASGYTFTSYLMQWVRQAPGQGLEWMGRIDPQSGGVKYAQK |
| | FQGRATLTVDTSTSTAYMELSRLRSDDTAVYYCARWDWGGYFDVWGQGTLVTVSS |
| 753 | EVQLVQSGAEVKKPGASVKVSCKASGYTFTSYLIQWVRQAPGQGLEWMGRIDPQSGGIKYAQK |
| | FQGRATLTVDTSTSTAYMELSRLRSDDTAVYYCARWDYGGYFDVWGQGTLVTVSS |
| 754 | EVQLVQSGAEVKKPGASVKVSCKASGYTFTSYWMQWVRQAPGQGLEWMGRIDPESGGVKYAQK |
| | FQGRATLTVDTSTSTAYMELSRLRSDDTAVYYCARWDWGGFFDVWGQGTLVTVSS |
| 755 | EVQLVQSGAEVKKPGASVKVSCKASGYTFTRYLMNWVRQAPGQGLEWMGRIDPQSGEGKYAQK |
| | FQGRATLTVDTSTSTAYMELSRLRSDDTAVYYCARWDYGGYFDVWGQGTLVTVSS |
| 756 | EVQLVQSGAEVKKPGASVKVSCKASGYTFTSYWMNWVRQAPGQGLEWMGRIDPQNGGIKYAQK |
| | FQGRATLTVDTSTSTAYMELSRLRSDDTAVYYCARWDYGGYFDVWGQGTLVTVSS |

TABLE 16
20E6 VL variants isolated from Doping Library after 2 hour off-rate selection,
P3 population

| Seq | |
|---|---|
| ID | |
| NO . | Amino acid sequence |
| 757 | DIQMTQSPSSLSASVGDRVTITCRASQDIYNYLNWYQQKPGKAVKLLIYYTSSLETGVPSRFS |
| | GSGSGTDYTLTISSLQPEDFATYFCQQGDTLPWTFGQGTKLEIK |
| 758 | DIQMTQSPSSLSASVGDRVTITCRASQDIYGYLNWYQQKPGKAVKLLIYYTSRLETGVPSRFS |
| | GSGSGTDYTLTISSLQPEDFATYFCQQGDTLPWTFGQGTKLEIK |
| 759 | DIQMTQSPSSLSASVGDRVTITCRASQDIYHYLNWYQQKPGKAVKLLIYYTSRLHSGVPSRFS |
| | GSGSGTDYTLTISSLQPEDFATYFCQQGDSLPWTFGQGTKLEIK |
| 760 | DIQMTQSPSSLSASVGDRVTITCRASQDIYNYLNWYQQKPGKAVKLLIYYTSSLETGVPSRFS |
| | GSGSGTDYTLTISSLQPEDFATYFCQQGDSMPWTFGQGTKLEIK |
| 761 | DIQMTQSPSSLSASVGDRVTITCRASQDIANYLNWYQQKPGKAVKLLIYYASGLETGVPSRFS |
| | GSGSGTDYTLTISSLQPEDFATYFCQQGDDLPWTFGQGTKLEIK |
| 762 | DIQMTQSPSSLSASVGDRVTITCRASQDIYNYLNWYQQKPGKAVKLLIYYTSRLETGVPSRFS |
| | GSGSGTDYTLTISSLQPEDFATYFCQQGDTLPWTFGQGTKLEIK |
| 763 | DIQMTQSPSSLSASVGDRVTITCRASQDIANYLNWYQQKPGKAVKLLIYYTSMLETGVPSRFS |
| | GSGSGTDYTLTISSLQPEDFATYFCQQGDTLPWTFGQGTKLEIK |
| 764 | DIQMTQSPSSLSASVGDRVTITCRASQDIYSYLNWYQQKPGKAVKLLIYYTSMLETGVPSRFS |
| | GSGSGTDYTLTISSLQPEDFATYFCQQGDTLPWTFGQGTKLEIK |
| 765 | DIQMTQSPSSLSASVGDRVTITCRASQDIFSYLNWYQQKPGKAVKLLIYYTSRLETGVPSRFS |
| | GSGSGTDYTLTISSLQPEDFATYFCQQGDTLPWTFGQGTKLEIK |
| 766 | DIQMTQSPSSLSASVGDRVTITCRASQDIFNYLNWYQQKPGKAVKLLIYYTSMLETGVPSRFS |
| | GSGSGTDYTLTISSLOPEDFATYFCQQGDAPPWTFGQGTKLEIK |
| 767 | DIQMTQSPSSLSASVGDRVTITCRASQDIYNYLNWYQQKPGKAVKLLIYYTSRLETGVPSRFS |
| | GSGSGTDYTLTISSLQPEDFATYFCQQGDALPWTFGQGTKLEIK |
| 768 | DIQMTQSPSSLSASVGDRVTITCRASQDITNYLNWYQQKPGKAVKLLIYYTSGLETGVPSRFS |
| | GSGSGTDYTLTISSLQPEDFATYFCQQGDILPWTFGQGTKLEIK |
| 769 | DIQMTQSPSSLSASVGDRVTITCRASQDITNYLNWYQQKPGKAVKLLIYYTSGLETGVPSRFS |
| | GSGSGTDYTLTISSLQPEDFATYFCQQGDALPWTFGQGTKLEIK |
| 770 | DIQMTQSPSSLSASVGDRVTITCRASQDIYNYLNWYQQKPGKAVKLLIYYTSRLETGVPSRES |
| | GSGSGTDYTLTISSLQPEDFATYFCQQGDSLPWTFGQGTKLEIK |
| 771 | DIQMTQSPSSLSASVGDRVTITCRASQDIFKYLNWYQQKPGKAVKLLIYYTSRLETGVPSRFS |
| | GSGSGTDYTLTISSLQPEDFATYFCQQGDTLPWTFGQGTKLEIK |
| 772 | DIQMTQSPSSLSASVGDRVTITCRASQDITNYLNWYQQKPGKAVKLLIYYSSRLETGVPSRFS |
| | GSGSGTDYTLTISSLQPEDFATYFCQQGDTLPWTFGQGTKLEIK |
| 773 | DIQMTQSPSSLSASVGDRVTITCRASQDIYNYLNWYQQKPGKAVKLLIYYSSRLETGVPSRFS |
| | GSGSGTDYTLTISSLQPEDFATYFCQQGDTLPWTFGQGTKLEIK |
| 774 | DIQMTQSPSSLSASVGDRVTITCRASQDITNYLNWYQQKPGKAVKLLIYYTSELETGVPSRFS |
| | GSGSGTDYTLTISSLOPEDFATYFCQQGDALPWTFGQGTKLEIK |
| 775 | DIQMTQSPSSLSASVGDRVTITCRASQDISYYLNWYQQKPGKAVKLLIYYSSLLETGVPSRFS |
| | GSGSGTDYTLTISSLQPEDFATYFCQQGDTLPWTFGQGTKLEIK |
| 776 | DIQMTQSPSSLSASVGDRVTITCRASQDIANYLNWYQQKPGKAVKLLIYYTSRLETGVPSRFS |
| | GSGSGTDYTLTISSLQPEDFATYFCQQGDTLPWTFGQGTKLEIK |
| 777 | DIQMTQSPSSLSASVGDRVTITCRASQDIFNYLNWYQQKPGKAVKLLIYYTSRLETGVPSRFS |
| | GSGSGTDYTLTISSLQPEDFATYFCQQGDILPWTFGQGTKLEIK |
| 778 | DIQMTQSPSSLSASVGDRVTITCRASQDITNYLNWYQQKPGKAVKLLIYYASMLETGVPSRFS |
| | GSGSGTDYTLTISSLOPEDFATYFCQQGDTVPWTFGQGTKLEIK |
| 779 | DIQMTQSPSSLSASVGDRVTITCRASQDIYNYLNWYQQKPGKAVKLLIYYSSRLHSGVPSRFS |
| | GSGSGTDYTLTISSLQPEDFATYFCQQGDTLPWTFGQGTKLEIK |
| 780 | DIQMTQSPSSLSASVGDRVTITCRASQDIYNYLNWYQQKPGKAVKLLIYYASRLETGVPSRFS |
| | GSGSGTDYTLTISSLQPEDFATYFCQQGDSLPWTFGQGTKLEIK |
| 781 | DIQMTQSPSSLSASVGDRVTITCRASQDIFNYLNWYQQKPGKAVKLLIYYTSRLHSGVPSRFS |
| | GSGSGTDYTLTISSLOPEDFATYFCQQGDTLPWTFGQGTKLEIK |
| 782 | DIQMTQSPSSLSASVGDRVTITCRASQDIYYYLNWYQQKPGKAVKLLIYYTSRLETGVPSRFS |
| | GSGSGTDYTLTISSLQPEDFATYFCQQGDTLPWTFGQGTKLEIK |
| 783 | DIQMTQSPSSLSASVGDRVTITCRASQDIFNYLNWYQQKPGKAVKLLIYYTSRLHSGVPSRFS |
| | GSGSGTDYTLTISSLQPEDFATYFCQQGDTVPWTFGQGTKLEIK |
| 784 | DIQMTQSPSSLSASVGDRVTITCRASQDITNYLNWYQQKPGKAVKLLIYYTSSLETGVPSRFS |
| | GSGSGTDYTLTISSLQPEDFATYFCQQGDTLPWTFGQGTKLEIK |
| 785 | DIQMTQSPSSLSASVGDRVTITCRASQDIFNYLNWYQQKPGKAVKLLIYYTSRLETGVPSRFS |
| | GSGSGTDYTLTISSLQPEDFATYFCQQGDYLPWTFGQGTKLEIK |
| 786 | DIQMTQSPSSLSASVGDRVTITCRASQDIANYLNWYQQKPGKAVKLLIYYTSELETGVPSRFS |
| | GSGSGTDYTLTISSLQPEDFATYFCQQGDSLPWTFGQGTKLEIK |
| 787 | DIQMTQSPSSLSASVGDRVTITCRASQDIFNYLNWYQQKPGKAVKLLIYYTSRLETGVPSRFS |
| | GSGSGTDYTLTISSLQPEDFATYFCQQGDTLPWTFGQGTKLEIK |
| 788 | DIQMTQSPSSLSASVGDRVTITCRASQDITNYLNWYQQKPGKAVKLLIYYTSRLHSGVPSRFS |
| | GSGSGTDYTLTISSLQPEDFATYFCQQGDTLPWTFGQGTKLEIK |
| 789 | DIQMTQSPSSLSASVGDRVTITCRASQDIYNYLNWYQQKPGKAVKLLIYYTSGLETGVPSRFS |
| | GSGSGTDYTLTISSLQPEDFATYFCQQGDTLPWTFGQGTKLEIK |
| 790 | DIQMTQSPSSLSASVGDRVTITCRASQDIYNYLNWYQQKPGKAVKLLIYYTSRLETGVPSRFS |
| | GSGSGTDYTLTISSLQPEDFATYFCQQGDGLPWTFGQGTKLEIK |
| 791 | DIQMTQSPSSLSASVGDRVTITCRASQDISNYLNWYQQKPGKAVKLLIYYTSGLETGVPSRFS |
| | GSGSGTDYTLTISSLQPEDFATYFCQQGDTLPWTFGQGTKLEIK |
| 792 | DIQMTQSPSSLSASVGDRVTITCRASQDIYNYLNWYQQKPGKAVKLLIYYTSRLETGVPSRFS |
| | GSGSGTDYTLTISSLQPEDFATYFCQQGDTVPWTFGQGTKLEIK |
| 793 | DIQMTQSPSSLSASVGDRVTITCRASQDIYNYLNWYQQKPGKAVKLLIYYTSNLETGVPSRFS |
| | GSGSGTDYTLTISSLQPEDFATYFCQQGDTLPWTFGQGTKLEIK |

TABLE 17
20E6 VH variants isolated from Doping Library 2 hour off-rate selection, P4
population

| Seq | |
|---|---|
| ID | Amino acid sequence |
| 794 | EVQLVQSGAEVKKPGASVKVSCKASGYTFTRYWMHWVRQAPGQGLEWMGRIDPPSGEIKYAQK |
| | FQGRATLTVDTSTSTAYMELSRLRSDDTAVYYCARWDYGGYFDVWGQGTLVTVSS |
| 795 | EVQLVQSGAEVKKPGASVKVSCKASGYTFTRYLMQWVRQAPGQGLEWMGRIDPDSGGSRYAQK |
| | FQGRATLTVDTSTSTAYMELSRLRSDDTAVYYCARWDYGGYFDVWGQGTLVTVSS |
| 796 | EVQLVQSGAEVKKPGASVKVSCKASGYTFTRYWMSWVRQAPGQGLEWMGRIDPQSGSFKYAQK |
| | FQGRATLTVDTSTSTAYMELSRLRSDDTAVYYCARWDYGGYFDVWGQGTLVTVSS |
| 797 | EVQLVQSGAEVKKPGASVKVSCKASGYTFTSYLMQWVRQAPGQGLEWMGRIDPQSGGIRYAQK |
| | FQGRATLTVDTSTSTAYMELSRLRSDDTAVYYCARWDYGGYFDVWGQGTLVTVSS |
| 798 | EVQLVQSGAEVKKPGASVKVSCKASGYTFTTYLMQWVRQAPGQGLEWMGRIDPQSGGFIYAQK |
| | FQGRATLTVDTSTSTAYMELSRLRSDDTAVYYCARWDYGGYFDVWGQGTLVTVSS |
| 799 | EVQLVQSGAEVKKPGASVKVSCKASGYTFTSYLVQWVRQAPGQGLEWMGRIDPESGGSRYAQK |
| | FQGRATLTVDTSTSTAYMELSRLRSDDTAVYYCARWDYGGYFDVWGQGTLVTVSS |
| 800 | EVQLVQSGAEVKKPGASVKVSCKASGYTFTNYYMNWVRQAPGQGLEWMGRIDPQSGGIIYAQK |
| | FQGRATLTVDTSTSTAYMELSRLRSDDTAVYYCARWNHGGYFDVWGQGTLVTVSS |
| 801 | EVQLVQSGAEVKKPGASVKVSCKASGYTFTRYWMQWVRQAPGQGLEWMGRIDPQNGVSKYAQK |
| | FQGRATLTVDTSTSTAYMELSRLRSDDTAVYYCARWDYGGYFDVWGQGTLVTVSS |
| 802 | EVQLVQSGAEVKKPGASVKVSCKASGYTFTSYLMNWVRQAPGQGLEWMGRIDPQSGGTKYAQK |
| | FQGRATLTVDTSTSTAYMELSRLRSDDTAVYYCARWDYGGYFDVWGQGTLVTVSS |
| 803 | EVQLVQSGAEVKKPGASVKVSCKASGYTFTSYDMHWVRQAPGQGLEWMGRIDLQGGVNRYAQK |
| | FQGRATLTVDTSTSTAYMELSRLRSDDTAVYYCARWDYGGYFDVWGQGTLVTVSS |
| 804 | EVOLVQSGAEVKKPGASVKVSCKASGYTFTTYSMQWVRQAPGQGLEWMGRIDPQSGGIKYAQK |
| | FQGRATLTVDTSTSTAYMELSRLRSDDTAVYYCARWDYGGYFDVWGQGTLVTVSS |
| 805 | EVOLVQSGAEVKKPGASVKVSCKASGYTFTSYYMNWVRQAPGQGLEWMGRIDPQEGGGKYAQK |
| | FQGRATLTVDTSTSTAYMELSRLRSDDTAVYYCARWDYGGYFDVWGQGTLVTVSS |
| 806 | EVQLVQSGAEVKKPGASVKVSCKASGYTFTSYLVQWVRQAPGQGLEWMGRIDPVSGGITYAQK |
| | FQGRATLTVDTSTSTAYMELSRLRSDDTAVYYCARWDYGGYFDVWGQGTLVTVSS |
| 807 | EVQLVQSGAEVKKPGASVKVSCKASGYTFTSYLMHWVRQAPGQGLEWMGRIDPESGGIKYAQK |
| | FQGRATLTVDTSTSTAYMELSRLRSDDTAVYYCARWDYGGYFDVWGQGTLVTVSS |
| 808 | EVQLVQSGAEVKKPGASVKVSCKASGYTFTRYLMHWVRQAPGQGLEWMGRIDPQSGGIKYAQK |
| | FQGRATLTVDTSTSTAYMELSRLRSDDTAVYYCARWDYGGYFDVWGQGTLVTVSS |
| 809 | EVQLVQSGAEVKKPGASVKVSCKASGYTFTSYLMQWVRQAPGQGLEWMGRIDPSSGGIGYAQK |
| | FQGRATLTVDTSTSTAYMELSRLRSDDTAVYYCARWDFGGYFDVWGQGTLVTVSS |
| 810 | EVQLVQSGAEVKKPGASVKVSCKASGYTFTSYWMQWVRQAPGQGLEWMGRIDPVSGGVKYAQK |
| | FQGRATMTVDTSTSTAYMELSRLRSDDTAVYYCARWDYGGYFDVWGQGTLVTVSS |
| 811 | EVOLVQSGAEVKKPGASVKVSCKASGYTFTRYLTHWVRQAPGQGLEWMGRIDPQIGGITYAQK |
| | FQGRATLTVDTSTSTAYMELSRLRSDDTAVYYCARWDYGGYFDVWGQGTLVTVSS |
| 812 | EVQLVQSGAEVKKPGASVKVSCKASGYTFTRYWMHWVRQAPGQGLEWMGRIDPTSGGIRYAQK |
| | FQGRATLTVDTSTSTAYMELSRLRSDDTAVYYCARWDYGGFFDVWGQGTLVTVSS |
| 813 | EVQLVQSGAEVKKPGASVKVSCKASGYTFTSYLINWVRQAPGQGLEWMGRIDPQSGGVKYAQK |
| | FQGRATLTVDTSTSTAYMELSRLRSDDTAVYYCARWDYGGYFDVWGQGTLVTVSS |
| 814 | EVQLVQSGAEVKKPGASVKVSCKASGYTFTSYWMQWVRQAPGQGLEWMGRIDPQSGGIKYAQK |
| | FQGRATLTVDTSTSTAYMELSRLRSDDTAVYYCARWDWGGYFDVWGQGTLVTVSS |
| 815 | EVQLVQSGAEVKKPGASVKVSCKASGYTFTRYLMHWVRQAPGQGLEWMGRIDPESGGVIYAQK |
| | FQGRATLTVDTSTSTAYMELSRLRSDDTAVYYCARWDYGGYFDVWGQGTLVTVSS |
| 816 | EVQLVQSGAEVKKPGASVKVSCKASGYTFTGYYMNWVRQAPGQGLEWMGRIDPRSGGFRYAQK |
| | FQGRATLTVDTSTSTAYMELSRLRSDDTAVYYCARWDYGGYFDVWGQGTLVTVSS |
| 817 | EVQLVQSGAEVKKPGASVKVSCKASGYTFTSYLLQWVRQAPGQGLEWMGRIDPMTGGMMYAQK |
| | FQGRATLTVDTSTSTAYMELSRLRSDDTAVYYCARWDYGGYFDVWGQGTLVTVSS |
| 818 | EVQLVQSGAEVKKPGASVKVSCKASGYTFTSYWMHWVRQAPGQGLEWMGRIDPHSGGKKYAQK |
| | FQGRATLTVDTSTSTAYMELSRLRSDDTAVYYCARWDYGGYFDVWGQGTLVTVSS |
| 819 | EVQLVQSGAEVKKPGASVKVSCKASGYTFTRYWMHWVRQAPGQGLEWMGRIDPQSGGMKYAQK |
| | FQGRATLTVDTSTSTAYMELSRLRSDDTAVYYCARWDYGGYFDVWGQGTLVTVSS |
| 820 | EVQLVQSGAEVKKPGASVKVSCKASGYTFTSYWLNWVRQAPGQGLEWMGRIDPQSGGVRYAQK |
| | FQGRATLTVDTSTSTAYMELSRLRSDDTAVYYCARWDYGGYFDVWGQGTLVTVSS |
| 821 | EVQLVQSGAEVKKPGASVKVSCKASGYTFTRYGMNWVRQAPGQGLEWMGRIDPQSGGNKYAQK |
| | FQGRATLTVDTSTSTAYMELSRLRSDDTAVYYCARWDWGGYFDVWGQGTLVTVSS |
| 822 | EVQLVQSGAEVKKPGASVKVSCKASGYTFTSYLMHWVRQAPGQGLEWMGRIDPHRGDSYYAQK |
| | FQGRATLTVDTSTSTAYMELSRLRSDDTAVYYCARWDWGGYFDVWGQGTLVTVSS |
| 823 | EVQLVQSGAEVKKPGASVKVSCKASGYTFTRYLLAWVROAPGQGLEWMGRIDPQSGGIRYAQK |
| | FQGRATLTVDTSTSTAYMELSRLRSDDTAVYYCARWDYGGYFDVWGQGTLVTVSS |
| 824 | EVQLVQSGAEVKKPGASVKVSCKASGYTFTSYWMHWVRQAPGQGLEWMGRIDPLSGGILYAQK |
| | FQGRATLTVDTSTSTAYMELSRLRSDDTAVYYCARWDYGGYFDVWGQGTLVTVSS |
| 825 | EVQLVQSGAEVKKPGASVKVSCKASGYTFTSYLIHWVRQAPGQGLEWMGRIDPESGGIKYAQK |
| | FQGRATLTVDTSTSTAYMELSRLRSDDTAVYYCARWDYGGYFDVWGQGTLVTVSS |
| 826 | EVQLVQSGAEVKKPGASVKVSCKASGYTFTSYLLQWVRQAPGQGLEWMGRIDPRNGGIIYAQK |
| | FQGRATLTVDTSTSTAYMELSRLRSDDTAVYYCARWDWGGYFDVWGQGTLVTVSS |
| 827 | EVQLVQSGAEVKKPGASVKVSCKASGYTFTRYWTHWVRQAPGQGLEWMGRIDPLHGGSKYAQK |
| | FQGRATLTVDTSTSTAYMELSRLRSDDTAVYYCARWDHGGYFDVWGQGTLVTVSS |

TABLE 18
20E6 VL variants isolated from Doping Library after 2 hour off-rate selection,
P4 population

| Seq | |
|---|---|
| ID | |
| NO. | Amino acid sequence |
| 828 | DIQMTQSPSSLSASVGDRVTITCRASQDITNYLNWYQQKPGKAVKLLIYYTSGLETGVPSRFS |
| | GSGSGTDYTLTISSLQPEDFATYFCQQGDTLPWTFGQGTKLEIK |
| 829 | DIQMTQSPSSLSASVGDRVTITCRASQDIYHYLNWYQQKPGKAVKLLIYYSSMLETGVPSRFS |
| | GSGSGTDYTLTISSLOPEDFATYFCQQGDTTPWTFGQGTKLEIK |
| 830 | DIQMTQSPSSLSASVGDRVTITCRASQDIYNYLNWYQQKPGKAVKLLIYYNSKLETGVPSRFS |
| | GSGSGTDYTLTISSLQPEDFATYFCQQGDTLPWTFGQGTKLEIK |
| 831 | DIQMTQSPSSLSASVGDRVTITCRASQDIYNYLNWYQQKPGKAVKLLIYYTSSLETGVPSRFS |
| | GSGSGTDYTLTISSLQPEDFATYFCQQGDSLPWTFGQGTKLEIK |
| 832 | DIQMTQSPSSLSASVGDRVTITCRASQDIYNYLNWYQQKPGKAVKLLIYYTSQLETGVPSRFS |
| | GSGSGTDYTLTISSLQPEDFATYFCQQGDTPPWTFGQGTKLEIK |
| 833 | DIQMTQSPSSLSASVGDRVTITCRASQDIYHYLNWYQQKPGKAVKLLIYYTSRLHSGVPSRFS |
| | GSGSGTDYTLTISSLQPEDFATYFCQQGDILPWTFGQGTKLEIK |
| 834 | DIQMTQSPSSLSASVGDRVTITCRASQDITNYLNWYQQKPGKAVKLLIYYTSMLETGVPSRFS |
| | GSGSGTDYTLTISSLQPEDFATYFCQQGDTLPWTFGQGTKLEIK |
| 835 | DIQMTQSPSSLSASVGDRVTITCRASQDINKYLNWYQQKPGKAVKLLIYYTSRLETGVPSRFS |
| | GSGSGTDYTLTISSLQPEDFATYFCQQGDILPWTFGQGTKLEIK |
| 836 | DIQMTQSPSSLSASVGDRVTITCRASQDIANYLNWYQQKPGKAVKLLIYYTSRLHSGVPSRFS |
| | GSGSGTDYTLTISSLQPEDFATYFCQQGDTLPWTFGQGTKLEIK |
| 837 | DIQMTQSPSSLSASVGDRVTITCRASQDIFNYLNWYQQKPGKAVKLLIYYSSMLETGVPSRFS |
| | GSGSGTDYTLTISSLQPEDFATYFCQQGDAQPWTFGQGTKLEIK |
| 838 | DIQMTQSPSSLSASVGDRVTITCRASQDITNYLNWYQQKPGKAVKLLIYYTSILETGVPSRFS |
| | GSGSGTDYTLTISSLQPEDFATYFCQQGDTLPWTFGQGTKLEIK |
| 839 | DIQMTQSPSSLSASVGDRVTITCRASQDIYNYLNWYQQKPGKAVKLLIYYTSSLETGVPSRFS |
| | GSGSGTDYTLTISSLQPEDFATYFCQQGDTLPWTFGQGTKLEIK |
| 840 | DIQMTQSPSSLSASVGDRVTITCRASQDIYNYLNWYQQKPGKAVKLLIYYTSSLHSGVPSRFS |
| | GSGSGTDYTLTISSLQPEDFATYFCQQGDTLPWTFGQGTKLEIK |
| 841 | DIQMTQSPSSLSASVGDRVTITCRASQDITNYLNWYQQKPGKAVKLLIYYTSRLETGVPSRFS |
| | GSGSGTDYTLTISSLQPEDFATYFCQQGDTLPWTFGQGTKLEIK |
| 842 | DIQMTQSPSSLSASVGDRVTITCRASQDIYKYLNWYQQKPGKAVKLLIYYTSRLETGVPSRFS |
| | GSGSGTDYTLTISSLQPEDFATYFCQQGDTLPWTFGQGTKLEIK |
| 843 | DIQMTQSPSSLSASVGDRVTITCRASQDITNYLNWYQQKPGKAVKLLIYYTSLLETGVPSRFS |
| | GSGSGTDYTLTISSLQPEDFATYFCQQGDTVPWTFGQGTKLEIK |
| 844 | DIQMTQSPSSLSASVGDRVTITCRASQDIYNYLNWYQQKPGKAVKLLIYYTSRLHSGVPSRFS |
| | GSGSGTDYTLTISSLQPEDFATYFCQQGDTLPWTFGQGTKLEIK |
| 845 | DIQMTQSPSSLSASVGDRVTITCRASQDIYNYLNWYQQKPGKAVKLLIYYSSRLETGVPSRFS |
| | GSGSGTDYTLTISSLQPEDFATYFCQQGDTLPWTFGQGTKLEIK |
| 846 | DIQMTQSPSSLSASVGDRVTITCRASQDITYYLNWYQQKPGKAVKLLIYYTSWLETGVPSRFS |
| | GSGSGTDYTLTISSLQPEDFATYFCQQGDALPWTFGQGTKLEIK |
| 847 | DIQMTQSPSSLSASVGDRVTITCRASQDIANYLNWYQQKPGKAVKLLIYYTSGLETGVPSRFS |
| | GSGSGTDYTLTISSLQPEDFATYFCQQGDILPWTFGQGTKLEIK |
| 848 | DIQMTQSPSSLSASVGDRVTITCRASQDITNYLNWYQQKPGKAVKLLIYYKSRLETGVPSRFS |
| | GSGSGTDYTLTISSLOPEDFATYFCQQGDILPWTFGQGTKLEIK |

TABLE 19
20E6 VH variants isolated from Doping Library
after 12 hour off-rate selection

| Seq | |
|---|---|
| ID | |
| NO. | Amino acid sequence |
| 849 | EVQLVQSGAEVKKPGASVKVSCKASGYTFTRYLVQWVRQAPGQGLEWMGRIDPQCGDLKYAQK |
| | FQGRATLTVDTSTSTAYMELSRLRSDDTAVYYCARWDYGGYFDVWGQGTLVTVSS |
| 850 | EVQLVQSGAEVKKPGASVKVSCKASGYTFTRYYLNWVRQAPGQGLEWMGRIDPQSGGTKYAQK |
| | FQGRATLTVDTSTSTAYMELSRLRSDDTAVYYCARWDWGGYFDVWGQGTLVTVSS |
| 851 | EVQLVQSGAEVKKPGASVKVSCKASGYTFTRYLNOWVRQAPGQGLEWMGRIDPQNGEINYAQK |
| | FQGRATLTVDTSTSTAYMELSRLRSDDTAVYYCARWDYGGYFDVWGQGTLVTVSS |
| 852 | EVQLVQSGAEVKKPGASVKVSCKASGYTFTSYLQSWVRQAPGQGLEWMGRIDPQSGGSRYAQK |
| | FQGRATLTVDTSTSTAYMELSRLRSDDTAVYYCARWDWGGQFDVWGQGTLVTVSS |
| 853 | EVQLVQSGAEVKKPGASVKVSCKASGYTFTSYYMNWVRQAPGQGLEWMGRIDPESGGSKYAQK |
| | FQGRATLTVDTSTSTAYMELSRLRSDDTAVYYCARWDYGGYFDVWGQGTLVTVSS |
| 854 | EVQLVQSGAEVKKPGASVKVSCKASGYTFTTYYMNWVRQAPGQGLEWMGRIDPLNGGVRYAQK |
| | FQGRATLTVDTSTSTAYMELSRLRSDDTAVYYCARWDYGGYFDVWGQGTLVTVSS |
| 855 | EVQLVQSGAEVKKPGASVKVSCKASGYTFTSYLVQWVRQAPGQGLEWMGRIDPQDGGVRYAQK |
| | FQGRATLTVDTSTSTAYMELSRLRSDDTAVYYCARWDYGGYFDVWGQGTLVTVSS |
| 856 | EVQLVQSGAEVKKPGASVKVSCKASGYTFTSYYMQWVRQAPGQGLEWMGRIDPESGGVKYAQK |
| | FQGRATLTVDTSTSTAYMELSRLRSDDTAVYYCARWDYGGYFDVWGQGTLVTVSS |
| 857 | EVQLVQSGAEVKKPGASVKVSCKASGYTFTNYYINWVRQAPGQGLEWMGRIDPQSGGVKYAQK |
| | FQGRATLTVDTSTSTAYMELSRLRSDDTAVYYCARWDYGGYFDVWGQGTLVTVSS |
| 858 | EVQLVQSGAEVKKPGASVKVSCKASGYTFTIYDMHWVRQAPGQGLEWMGRIDPQSGGIKYAQK |
| | FQGRATLTVDTSTSTAYMELSRLRSDDTAVYYCARWDYGGYFDVWGQGTLVTVSS |
| 859 | EVQLVQSGAEVKKPGASVKVSCKASGYTFTRYYLSWVRQAPGQGLEWMGRIDPHIGGIKYAQK |
| | FQGRATLTVDTSTSTAYMELSRLRSDDTAVYYCARWDWGGYFDVWGQGTLVTVSS |
| 860 | EVQLVQSGAEVKKPGASVKVSCKASGYTFTSYFMNWVRQAPGQGLEWMGRIDPLDGSIKYAQK |
| | FQGRATLTVDTSTSTAYMELSRLRSDDTAVYYCARWDYGGYFDVWGQGTLVTVSS |
| 861 | EVQLVQSGAEVKKPGASVKVSCKASGYTFTSYLMQWVRQAPGQGLEWMGRIDPQIGDSIYAQK |
| | FQGRATLTVDTSTSTAYMELSRLRSDDTAVYYCARWDWGGYFDVWGQGTLVTVSS |
| 862 | EVQLVQSGAEVKKPGASVKVSCKASGYTFTSYYMNWVRQAPGQGLEWMGRIDPQSGGVKYAQK |
| | FQGRATLTVDTSTSTAYMELSRLRSDDTAVYYCARWDYGGYFDVWGQGTLVTVSS |
| 863 | EVQLVQSGAEVKKPGASVKVSCKASGYTFTSYYINWVRQAPGQGLEWMGRIDPQSGDIKYAQK |
| | FQGRATLTVDTSTSTAYMELSRLRSDDTAVYYCARWDYGGYFDVWGQGTLVTVSS |
| 864 | EVQLVQSGAEVKKPGASVKVSCKASGYTFTGYFLNWVRQAPGQGLEWMGRIDPQSGGRIYAQK |
| | FQGRATLTVDTSTSTAYMELSRLRSDDTAVYYCARWDWGGYFDVWGQGTLVTVSS |
| 865 | EVQLVQSGAEVKKPGASVKVSCKASGYTFTRYYTNWVRQAPGQGLEWMGRIDPQTGGIRYAQK |
| | FQGRATLTVDTSTSTAYMELSRLRSDDTAVYYCARWDYGGYFDVWGQGTLVTVSS |
| 866 | EVQLVQSGAEVKKPGASVKVSCKASGYTFTSYWMQWVRQAPGQGLEWMGRIDPQIGDTKYAQK |
| | FQGRATLTVDTSTSTAYMELSRLRSDDTAVYYCARWDYGGYFDVWGQGTLVTISS |
| 867 | EVQLVQSGAEVKKPGASVKVSCKASGYTFTRYWMHWVRQAPGQGLEWMGRIDPQDGGIIYAQK |
| | FQGRATLTVDTSTSTAYMELSRLRSDDTAVYYCARWDYGGYFDVWGQGTLVTVSS |
| 868 | EVRLVQSGAEVKKPGASVKVSCKASGYTFTRYWLQWVRQASGQGLEWMGRIDPLDGGTKYAQK |
| | FQGRATLTVDTSTSTAYMELSRLRSDDTAVYYCARWDYGGYFDVWGQGTLVTVSS |
| 869 | EVQLVQSGAEVKKPGASVKVSCKASGYTFTYYDVHWVRQAPGQGLEWMGRIDPHDGGIKYAQK |
| | FQGRATLTVDTSTSTAYMELSRLRSDDTAVYYCARWDYGGYFDVWGQGTLVTVSS |
| 870 | EVQLVQSGAEVKKPGASVKVSCKASGYTFTGYYVNWVRQAPGQGLEWMGRIDPESGGMLYAQK |
| | FQGRATLTVDTSTSTAYMELSRLRSDDTAVYYCARWDYGGYFDVWGQGTLVTVSS |
| 871 | EVQLVQSGAEVKKPGASVKVSCKASGYTFTRYWLQWVRQAPGQGLEWMGRIDPQGGDIKYAQK |
| | FQGRATLTVDTSTSTAYMELSRLRSDDTAVYYCARWDYGGYFDVWGHGTLVTVSS |
| 872 | EVQLVQSGAEVKKPGASVKVSCKASGYTFTSYDMHWVRQAPGQGLEWMGRIDPQSGGTRYAQK |
| | FQGRATLTVDTSTSTAYMELSRLRSDDTAVYYCARWDYGGYFDVWGQGTLVTVSS |
| 873 | EVQLVQSGAEVKKPGASVKVSCKASGYTFTSYYMNWVRQAPGQGLEWMGRIDPQSGGNKYAQK |
| | FQGRATLTVDTSTSTAYMELSRLRSDDTAVYYCARWDYGGYFDVWGQGTLVTVSS |
| 874 | EVQLVQSGAEVKKPGASVKVSCKASGYTFTSYDIHWVRQAPGQGLEWMGRIDPESGGIKYAQK |
| | FQGRATLTVDTSTSTAYMELSRLRSDDTAVYYCARWDYGGYFDVWGQGTLVTVSS |
| 875 | EVQLVQSGAEVKKPGASVKVSCKASGYTFTSYLIQWVRQAPGQGLEWMGRIDPQSGGVKYAQK |
| | FQGRATLTVDTSTSTAYMELSRLRSDDTAVYYCARWDYGGQFDVWGQGTLVSVSS |
| 876 | EVQLVQSGAEVKKPGASVKVSCKASGYTFTSYYLNWVRQAPGQGLEWMGRIDPQGGGLKYAQK |
| | FQGRATLTVDTSTSTAYMELSRLRSDDTAVYYCARWDYGGYFDVWGQGTLVTVSS |
| 877 | EVQLVQSGAEVKKPGASVKVSCKASGYTFTSYYLNWVRQAPGQGLEWMGRIDPKSGDIIYAQK |
| | FQGRATLTVDTSTSTAYMELSRLRSDDTAVYYCARWDYGGYFDVWGQGTLVTVSS |
| 878 | EVQLVQSGAEVKKPGASVKVSCKASGYTFTRYYVNWVRQAPGQGLEWMGRIDPESGGIKYAQK |
| | FQGRATLTVDTSTSTAYMELSRLRSDDTAVYYCARWDYGGYFDVWGQGTLVTVSS |
| 879 | EVOLVQSGAEVKKPGASVKVSCKASGYTFTTYYMSWVRQAPGQGLEWMGRIDPQSGGSKYAQK |
| | FQGRATLTVDTSTSTAYMELSRLRSDDTAVYYCARWDYGGYFDVWGQGTLVTVSS |
| 880 | EVQLVQSGAEVKKPGASVKVSCKASGYTETTYFMNWVRQAPGQGLEWMGRIDPQSGGIKYAQK |
| | FQGRATLTVDTSTSTAYMELSRLRSDDTAVYYCARWDYGGYFDVWGQGTLVTVSS |
| 881 | EVQLVQSGAEVKKPGASVKVSCKASGYTFTRYLMQWVRQAPGQGLEWMGRIDPQDGGIKYAQK |
| | FQGRATLTVDTSTSTAYMELSRLRSDDTAVYYCARWDYGGYFDVWGQGTLVTVSS |
| 882 | EVQLVZSGAEVKKPGASVKVSCKZSGYTFTSYLLSWVRQAPGQGLEWMGRIDPQSGGIRYAQK |
| | FQGRATLTVDTSTSTAYMELSRLRSDDTAVYYCARWDYGGYFDVWGQGTLVTVSS |
| 883 | EVQLVQSGAEVKKPGASVKVSCKASGYTFTRYWMQWVRQAPGQGLEWMGRIDPQSGDVRYAQK |
| | FQGRATLTVDTSTSTAYMELSRLRSDDTAVYYCARWDYGGYFDVWGQGTLVTVSS |
| 884 | EVQLVQSGAEVKKPGASVKVSCKASGYTFTTYYMHWVRQAPGQGLEWMGRIDPQIGESKYAQK |
| | FQGRATLTVDTSTSTAYMELSRLRSDDTAVYYCARWDYGGYFDVWGQGTLVTVSS |
| 885 | EVQLVQSGAEVKKPGASVKVSCKASGYTFTSYLINWVRQAPGQGLEWMGRIDPEDGGNKYAQK |
| | FQGRATLTVDTSTSTAYMELSRLRSDDTAVYYCARWDYGGYFDVWGHGTLVTVSS |
| 886 | EVQLVQSGAEVKKPGASVKVSCKASGYTFTSYYMTWVRQAPGQGLEWMGRIDPQSGGGKYAQK |
| | FQGRATLTVDTSTSTAYMELSRLRSDDTAVYYCARWDYGGQFDVWGQGTLVTVSS |
| 887 | EVQLVQSGAEVKKPGASVKVSCKASGYTETRYWIQWVRQAPGQGLEWMGRIDPQIGEKRYAQK |
| | FQGRATLTVDTSTSTAYMELSRLRSDDTAVYYCARWDYGGYFDVWGQGTLVTVSS |
| 888 | EVQLVQSGAEVKKPGASVKVSCKASGYTFTSYDTHWVRQAPGQGLEWMGRIDPENGGTKYAQK |
| | FQGRATLTVDTSTSTAYMELSRLRSDDTAVYYCARWDWGGYFDVWGQGTLVTVSS |
| 889 | EVQLVQSGAEVKKPGASVKVSCKASGYTETTYDMHWVRQAPGQGLEWMGRIDPQSGGIKYAQK |
| | FQGRATLTVDTSTSTAYMELSRLRSDDTAVYYCARWDYGGYFDVWGQGTLVTVSS |
| 890 | EVQLVQSGAEVKKPGASVKVSCKASGYTFTSYYMNWVRQAPGQGLEWMGRIDPESGGIKYAQK |
| | FQGRATLTVDTSTSTAYMELSRLRSDDTAVYYCARWDYGGYFDVWGQGTLVTVSS |
| 891 | EVQLVQSGAEVKKPGASVKVSCKASGYTFTSYYMNWVRQAPGQGLEWMGRIDPQSGGIIYAQK |
| | FQGRATLTVDTSTSTAYMELSRLRSDDTAVYYCARFDYGGYFDVWGQGTLVTVSS |
| 892 | EVQLVQSGAEVKKPGASVKVSCKASGYTFTRYDLHWVRQAPGQGLEWMGRIDPISGGIKYAQK |
| | FQGRATLTVDTSTSTAYMELSRLRSDDTAVYYCARWDYGGYFDVWGQGTLVTVSS |
| 893 | EVQLVQSGAEVKKPGASVKVSCKASGYTFTRYWIQWVRQAPGQGLEWMGRIDPQDGGIKYAQK |
| | FQGRATLTVDTSTSTAYMELSRLRSDDTAVYYCARWDYGGYFDVWGQGTLVTVSS |

TABLE 20
20E6 VL variants isolated from Doping Library after
12 hour off-rate selection

| Seq | |
|---|---|
| ID | |
| NO. | Amino acid sequence |
| 894 | DIQMTQSPSSLSASVGDRVTITCRASQDIWKYLNWYQQKPGKAVKLLIYYTSILETGVPSRFS |
| | GSGSGTDYTLTISSLQPEDFATYFCQQGDSLPWTFGQGTKLEIK |
| 895 | DIQMTQSPSSLSASVGDRVTITCRASQDIWNYLNWYQQKPGKAVKLLIYYTSILETGVPSRFS |
| | GSGSGTDYTLTISSLQPEDFATYFCQQGDTLPWTFGQGTKLDIK |
| 896 | DIQMTQSPSSLSASVGDRVTITCRASQDIWNYLNWYQQKPGKAVKLLIYYTSILHSGVPSRFS |
| | GSGSGTDYTLTISSLQPEDFATYFCQQGDTLPWTFGQGTKLEIK |
| 897 | DIQMTQSPSSLSASVGDRVTITCRASQDIWNYLNWYQQKPGKAVKLLIYYTSMLETGVPSRFS |
| | GSGSGTDYTLTISSLQPEDFATYFCQQGDSLPWTFGQGTKLEIK |
| 898 | DIQMTQSPSSLSASVGDRVTITCRASQDIWHYLNWYQQKPGKAVKLLIYYTSELETGVPSRFS |
| | GSGSGTDYTLTISSLOPEDFATYFCQQGDTLPWTFGQGTKLEIK |
| 899 | DIQMTQSPSSLSASVGDRVTITCRASQDIWNYLNWYQQKPGKAVKLLIYYTSRLETGVPSRFS |
| | GSGSGTDYTLTISSLOPEDFATYFCQQGDTLPWTFGQGTKLEIK |
| 900 | DIQMTQSPSSLSASVGDRVTITCRASQDIWNYLNWYQQKPGKAVKLLIYYTSGLHSGVPSRFS |
| | GSGSGTDYTLTISSLQPEDFATYFCQQGDILPWTFGQGTKLEIK |
| 901 | DIQMTQSPSSLSASVGDRVTITCRASQDIWKYLNWYQQKPGKAVKLLIYYTSGLETGVPSRFS |
| | GSGSGTDYTLTISSLQPEDFATYFCQQGDTLPWTFGQGTKLEIK |
| 902 | DIQMTQSPSSLSASVGDRVTITCRASQDIWNYLNWYQQKPGKAVKLLIYYTSMLHSGVPSRFS |
| | GSGSGTDYTLTISSLQPEDFATYFCQQGDSLPWTFGQGTKLEIK |
| 903 | DIQMTQSPSSLSASVGDRVTITCRASQDIWNYLNWYQQKPGKAVKLLIYYTSGLETGVPSRFS |
| | GSGSGTDYTLTISSLQPEDFATYFCQQGDSLPWTFGQGTKLEIK |
| 904 | DIQMTQSPSSLSASVGDRVTITCRASQDIWNYLNWYQQKPGKAVKLLIYYTSMLHSGVPSRFS |
| | GSGSGTDYTLTISSLQPEDFATYFCQQGDTLPWTFGQGTKLEIK |
| 905 | DIQMTQSPSSLSASVGDRVTITCRASQDIWNYLNWYQQKPGKAVKLLIYYTSGLETGVPSRFS |
| | GSGSGTDYTLTISSLQPEDFATYFCQQGDTLPWTFGQGTKLEIK |
| 906 | DIQMTQSPSSLSASVGDRVTITCRASQDIWNYLNWYQQKPGKAVKLLIYYTSRLETGVPSRFS |
| | GSGSGTDYTLTISSLQPEDFATYFCQQGDNLPWTFGQGTKLEIK |
| 907 | DIQMTQSPSSLSASVGDRVTITCRASQDIWNYLNWYQQKPGKAVKLLIYYTSRLHSGVPSRFS |
| | GSGSGTDYTLTISSLQPEDFATYFCQQGDALPWTFGQGTKLEIK |
| 908 | DIQMTQSPSSLSASVGDRVTITCRASQDIWNYLNWYQQKPGKAVKLLIYYTSVLETGVPSRFS |
| | GSGSGTDYTLTISSLOPEDFATYFCQQGDNLPWTFGQGTKLEIK |
| 909 | DIQMTQSPSSLSASVGDRVTITCRASQDIWNYLNWYQQKPGKAVKLLIYYTSVLETGVPSRFS |
| | GSGSGTDYTLTISSLQPEDFATYFCQQGDELPWTFGQGTKLEIK |
| 910 | DIQMTQSPSSLSASVGDRVTITCRASQDIWNYLNWYQQKPGKAVKLLIYYTSMLETGVPSRFS |
| | GSGSGTDYTLTISSLQPEDFATYFCQQGDTLPWTFGQGTKLEIK |
| 911 | DIQMTQSPSSLSASVGDRVTITCRASQDIWNYLNWYQQKPGKAVKLLIYYTSMLHSGVPSRFS |
| | GSGSGTDYTLTISSLQPEDFATYFCQQGDMLPWTFGQGTKLEIK |
| 912 | DIQMTQSPSSLSASVGDRVTITCRASQDIWNYLNWYQQKPGKAVKLLIYYTSLLETGVPSRFS |
| | GSGSGTDYTLTISSLOPEDFATYFCQQGDTLPWTFGQGTKLEIK |
| 913 | DIQMTQSPSSLSASVGDRVTITCRASQDIWNYLNWYQQKPGKAVKLLIYYTSKLETGVPSRFS |
| | GSGSGTDYTLTISSLQPEDFATYFCQQGDSLPWTFGQGTKLEIK |
| 914 | DIQMTQSPSSLSASVGDRVTITCRASQDIWHYLNWYQQKPGKAVKLLIYYTSMLETGVPSRFS |
| | GSGSGTDYTLTISSLQPEDFATYFCQQGDTLPWTFGQGTKLEIK |
| 915 | DIQMTQSPSSLSASVGDRVTITCRASQDIWHYLNWYQQKPGKAVKLLIYYTSMLETGVPSRFS |
| | GSGSGTDYTLTISSLQPEDFATYFCQQGDILPWTFGQGTKLEIK |
| 916 | DIQMTQSPSSLSASVGDRVTITCRASQDIWHYLNWYQQKPGKTVKLLIYYTSQLHSGVPSRFS |
| | GSGSGTDYTLTISSLQPEDFATYFCQQGDTLPWTFGQGTKLEIK |
| 917 | DIQMTQSPSSLSASVGDRVTITCRASQDIWNYLNWYQQKPGKAVKLLIYYTSILETGVPSRFS |
| | GSGSGTDYTLTISSLQPEDFATYFCQQGDSLPWTFGQGTKLEIK |
| 918 | DIQMTQSPSSLSASVGDRVTITCRASQDIWNYLNWYQQKPGKAVKLLIYYTSGLETGVPSRFS |
| | GSGSGTDYTLTISSLQPEDFATYFCQQGDMLPWTFGQGTKLEIK |
| 919 | DIQMTQSPSSLSASVGDRVTITCRASQDIWNYLNWYQQKPGKAVKLLIYYTSMLETGVPSRFS |
| | GSGSGTDYTLTISSLQPEDFATYFCQQGDALPWTFGQGTKLEIK |
| 920 | DIQMTQSPSSLSASVGDRVTITCRASQDIWNYLNWYQQKPGKAVKLLIYYTSGLHSGVPSRFS |
| | GSGSGTDYTLTISSLQPEDFATYFCQQGDTLPWTFGQGTKLEIK |

TABLE 21
20E6 VH variants isolated from TRIM library after
2 hour off-rate selection, P1 population

| Seq | |
|---|---|
| ID | |
| NO. | Amino acid sequence |
| 921 | EVQLVQSGAEVKKPGASVKVSCKASGYTFTSYDVHWVRQAPGQGLEWMGRIDPQSGGVKYAQK |
| | FQGRATLTVDTSTSTAYMELSRLRSDDTAVYYCARWDYGGYFDVWGQGTLVTVSS |
| 922 | EVQLVQSGAEVKKPGASVKVSCKASGYTFTSYDMHWVRQAPGQGLEWMGRIDPQSGGIKYAQK |
| | FQGRATLTVDTSTSTAYMELSRLRSDDTAVYYCARWDYGGYFDVWGQGTLVTVSS |
| 923 | EVQLVQSGAEVKKPGASVKVSCKASGYTFTSYDMHWVRQAPGQGLEWMGRIDPQTGGTKYAQK |
| | FQGRATLTVDTSTSTAYMELSRLRSDDTAVYYCARWDYGGYFDVWGQGTLVTVSS |
| 924 | EVQLVQSGAEVKKPGASVKVSCKASGYTFTNYYMAWVRQAPGQGLEWMGRIDPQDGAIKYAQK |
| | FQGRATLTVDTSTSTAYMELSRLRSDDTAVYYCARWDYGGYFDVWGQGTLVTVSS |
| 925 | EVQLVQSGAEVKKPGASVKVSCKASGYTETRYDMHWVRQAPGQGLEWMGRIDPTSGGIKYAQK |
| | FQGRATLTVDTSTSTAYMELSRLRSDDTAVYYCARWDYGGYFDVWGQGTLVTVSS |
| 926 | EVQLVQSGAEVKKPGASVKVSCKASGYTFTSYDKHWVRQAPGQGLEWMGRIDPQDGGIKYAQK |
| | FQGRATLTVDTSTSTAYMELSRLRSDDTAVYYCARWDYGGYFDVWGQGTLVTVSS |
| 927 | EVQLVQSGAEVKKPGASVKVSCKASGYTFTRYDLHWVRQAPGQGLEWMGRIDPQSGGTKYAQK |
| | FQGRATLTVDTSTSTAYMELSRLRSDDTAVYYCARWDYGGQFDVWGQGTLVTVSS |
| 928 | EVQLVQSGAEVKKPGASVKVSCKASGYTFTYYDMHWVRQAPGQGLEWMGRIDPYDGDIKYAQK |
| | FQGRATLTVDTSTSTAYMELSRLRSDDTAVYYCARWDYGGYFDVWGQGTLVTVSS |
| 929 | EVQLVQSGAEVKKPGASVKVSCKASGYTFTFYDMHWVRQAPGQGLEWMGRIDPDRGGIKYAQK |
| | FOGGATLTVDTSTSTAYMELSRLRSDDTAVYYCARWDYGGYFDVWGQGTLVTVSS |
| 930 | EVQLVQSGAEVKKPGASVKVSCKASGYTFTSYDMHWVRQAPGQGLEWMGRIDPQTGGEKYAQK |
| | FQGRATLTVDTSTSTAYMELSRLRSDDTAVYYCARWAYGGQFDVWGQGTLVTVSS |
| 931 | EVQLVQSGAEVKKPGASVKVSCKASGYTFTRYDLHWVRQAPGQGLEWMGRIDPDDGGRKYAQK |
| | FQGRATLTVDTSTSTAYMELSRLRSDDTAVYYCARWDYGGYFDVWGQGTLVTVSS |
| 932 | EVQLVQSGAEVKKPGASVKVSCKASGYTFTSYDMHWVRQAPGQGLEWMGRIDPQNGGDKYAQK |
| | FQGRATLTVDTSTSTAYMELSRLRSDDTAVYYCARWDYGGYFDVWGQGTLVTVSS |
| 933 | EVQMVQSGAEVKKPGASVKVSCKASGYTFTSYDLHWVRQAPGQGLEWMGRIDPDSGGVKYAQK |
| | FQGRATLTVDTSTSTAYMELSRLRSDDTAVYYCARWDYGGYFDVWGQGTLVTVSS |
| 934 | EVQLVQSGAEVKKPGASVKVSCKASGYTFTRYDMHWVRQAPGQGLEWMGRIDPQTGGVKYAQK |
| | FQGRATLTVDTSTSTAYMELSRLRSDDTAVYYCARWDYGGYFDVWGQGTLVTVSS |
| 935 | EVQLVQSGAEVKKPGASVKVSCKASGYTFTSYDMHWVRQAPGQGLEWMGRIDPQSGGIRYAQK |
| | FQGRATLTVDTSTSTAYMELSRLRSDDTAVYYCARWDYGGYFDVWGQGTLVTVSS |
| 936 | EVQLVQSGAEVKKPGASVKVSCKASGYTFTSYDMHWVRQAPGQGLEWMGRIDPQSGGIRYAQK |
| | FQGRATLTVDTSTSTAYMELSRLRSDDTAVYYCARWDYGGYFDVWGQGTLVTVSS |
| 937 | EVQLVQSGAEVKKPGASVKVSCKASGYTFTSYWMQWVRQAPGQGLEWMGRIDPQDGDIKYAQK |
| | FQGRATLTVDTSTSTAYMELSRLRSDDTAVYYCARYDYGGYFDVWGQGTLVTVSS |
| 938 | EVQLVQSGAEVKKPGASVKVSCKASGYTFTSYDMHWVRQAPGQGLEWMGRIDPQSGGSKYAQK |
| | FQGRATLTVDTSTSTAYMELSRLRSDDTAVYYCARWDYGGYFDVWGQGTLVTVSS |
| 939 | EVQLVQSGAEVKKPGASVKVSCKASGYTFTSYYMQWVRQAPGQGLEWMGRIDPFDGDIKYAQK |
| | FQGRATLTVDTSTSTAYMELSRLRSDDTAVYYCARWDYGGYFDVWGQGTLVTVSS |
| 940 | EVQLVQSGAEVKKPGASVKVSCKASGYTFTKYDMHWVRQAPGQGLEWMGRIDPQDGGFKYAQK |
| | FQGRATLTVDTSTSTAYMELSRLRSDDTAVYYCARWDYGGYFDVWGQGTLVTVSS |
| 941 | EVQLVQSGAEVKKPGASVKVSCKASGYTFTYYDMHWVRQAPGQGLEWMGRIDPQSGGIKYAQK |
| | FQGRATLTVDTSTSTAYMELSRLRSDDTAVYYCARWDYGGYFDVWGQGTLVTVSS |
| 942 | EVQLVQSGAEVKKPGASVKVSCKASGYTFTSYDLHWVRQAPGQGLEWMGRIDPFNGGGKYAQK |
| | FQGRATLTVDTSTSTAYMELSRLRSDDTAVYYCARWDYGGYFDVWGQGTLVTVSS |
| 943 | EVQLVQSGAEVKKPGASVKVSCKASGYTFTSYDSHWVRQAPGQGLEWMGRIDPQTGGIKYAQK |
| | FQGRATLTVDTSTSTAYMELSRLRSDDTAVYYCARWDYGGYFDVWGQGTLVTVSS |
| 944 | EVQLVQSGAEVKKPGASVKVSCKASGYTFTRYDMHWVRQAPGQGLEWMGRIDPQTGGIKYAQK |
| | FQGRATLTVDTSTSTAYMELSRLRSDDTAVYYCARWDYGGYFDVWGQGTLVTVSS |
| 945 | EVQLVQSGAEVKKPGASVKVSCKASGYTFTSYDMHWVRQAPGQGLEWMGRIDPQSGGTKYAQK |
| | FQGRATLTVDTSTSTAYMELSRLRSDDTAVYYCARWDYGGYFDVWGQGTLVTVSS |
| 946 | EVQLVQSGAEVKKPGASVKVSCKASGYTFTSYDMHWVRQAPGQGLEWMGRIDPQDGGIRYAQK |
| | FQGRATLTVDTSTSTAYMELSRLRSDDTAVYYCARWDYGGYFDVWGQGTLVTVSS |
| 947 | EVQLVQSGAEVKKPGASVKVSCKASGYTFTSYDMHWVRQAPGQGLEWMGRIDPQSGGVKYAQK |
| | FQGRATLTVDTSTSTAYMELSRLRSDDTAVYYCARWDYGGYFDVWGQGTLVTVSS |
| 948 | EVQLVQSGAEVKKPGASVKVSCKASGYTFTNYDMHWVRQAPGQGLEWMGRIDPQNGGVKYAQK |
| | FQGRATLTVDTSTSTAYMELSRLRSDDTAVYYCARWDYGGYFDVWGQGTLVTVSS |
| 949 | EVQLVQSGAEVKKPGASVKVSCKASGYTFTSYDMHWVRQAPGQGLEWMGRIDPQSGGSRYAQK |
| | FQGRATLTVDTSTSTAYMELSRLRSDDTAVYYCARWDFGGYFDVWGQGTLVTVSS |
| 950 | EVQLVQSGAEVKKPGASVKVSCKASGYTFTRYDMHWVRQAPGQGLEWMGRIDPQSGGIKYAQK |
| | FQGRATLTVDTSTSTAYMELSRLRSDDTAVYYCARWDYGGYFDVWGQGTLVTVSS |

TABLE 22
20E6 VL variants isolated from TRIM library after
2 hour off-rate selection, P1 population

| Seq | |
|---|---|
| ID | Amino acid sequence |
| 951 | DIQMTQSPSSLSASVGDRVTITCRASQDIYNYLNWYQQKPGKAVKLLIYYTSLLHSGVPSRFS |
| | GSGSGTDYTLTISSLQPEDFATYFCQQGDEVPWTFGQGTKLEIK |
| 952 | DIQMTQSPSSLSASVGDRVTITCRASQDIYNYLNWYQQKPGKAVKLLIYYTSGLHSGVPSRFS |
| | GSGSGTDYTLTISSLOPEDFATYFCQQGDALPWTFGQGTKLEIK |
| 953 | DIQMTQSPSSLSASVGDRVTITCRASQDIFNYLNWYQQKPGKAVKLLIYYTSLLHSGVPSRFS |
| | GSGSGTDYTLTISSLQPEDFATYFCQQGDLLPWTFGQGTKLEIK |
| 954 | DIQMTQSPSSLSASVGDRVTITCRASQDIYNYLNWYQQKPGKAVKLLIYYTSVLHSGVPSRFS |
| | GSGSGTDYTLTISSLOPEDFATYFCQQGDELPWTFGQGTKLEIK |
| 955 | DIQMTQSPSSLSASVGDRVTITCRASQDIYNYLNWYQQKPGKAVKLLIYYTSVLHSGVPSRFS |
| | GSGSGTDYTLTISSLQPEDFATYFCQQGDTLPWTFGQGTKLEIK |
| 956 | DIQMTQSPSSLSASVGDRVTITCRASQDIFNYLNWYQQKPGKAVKLLIYYTSILHSGVPSRFS |
| | GSGSGTDYTLTISSLQPEDFATYFCQQGDELPWTFGQGTKLEIK |
| 957 | DIQMTQSPSSLSASVGDRVTITCRASQDIYNYLNWYQQKPGKAVKLLIYYTSNLHSGVPSRFS |
| | GSGSGTDYTLTISSLQPEDFATYFCQQGDELPWTFGQGTKLEIK |
| 958 | DIQMTQSPSSLSASVGDRVTITCRASQDIYYYLNWYQQKPGKAVKLLIYYTSILHSGVPSRFS |
| | GSGSGTDYTLTISSLQPEDFATYFCQQGDTLPWTFGQGTKLEIK |
| 959 | DIQMTQSPSSLSASVGDRVTITCRASQDIFNYLNWYQQKPGKAVKLLIYYTSYLHSGVPSRFS |
| | GSGSGTDYTLTISSLQPEDFATYFCQQGDELPWTFGQGTKLEIK |
| 960 | DIQMTQSPSSLSASVGDRVTITCRASQDIYNYLNWYQQKPGKAVKLLIYYTSHLHSGVPSRFS |
| | GSGSGTDYTLTISSLQPEDFATYFCQQGDELPWTFGQGTKLEIK |
| 961 | DIQMTQSPSSLSASVGDRVTITCRASQDIYNYLNWYQQKPGKAVKLLIYYTSVLHSGVPSRFS |
| | GSGSGTDYTLTISSLQPEDFATYFCQQGDALPWTFGQGTKLEIK |
| 962 | DIQMTQSPSSLSASVGDRVTITCRASQDIYNYLNWYQQKPGKAVKLLIYYTSQLHSGVPSRES |
| | GSGSGTDYTLTISSLOPEDFATYFCQQGDTLPWTFGQGTKLEIK |
| 963 | DIQMTQSPSSLSASVGDRVTITCRASQDIYKYLNWYQQKPGKAVKLLIYYTSGLHSGVPSRFS |
| | GSGSGTDYTLTISSLOPEDFATYFCQQGDTLPWTFGQGTKLEIK |
| 964 | DIQMTQSPSSLSASVGDRVTITCRASQDIYNYLNWYQQKPGKAVKLLIYYTSLLHSGVPSRFS |
| | GSGSGTDYTLTISSLOPEDFATYFCQQGDELPWTFGQGTKLEIK |
| 965 | DIQMTQSPSSLSASVGDRVTITCKASQDIYNYLNWYQQKPGKAVKLLIYYTSHLHSGVPSRFS |
| | GSGSGTDYTLTISSLQPEDFATYFCQQGDTLPWTFGQGTKLEIK |
| 966 | DIQMTQSPSSLSASVGDRVTITCRASQDIFNYLNWYQQKPGKAVKLLIYYTSILHSGVPSRFS |
| | GSGSGTDYTLTISSLQPEDFATYFCQQGDTLPWTFGQGTKLEIK |
| 967 | DIQMTQSPSSLSASVGDRVTITCRASQDIYNYLNWYQQKPGKAVKLLIYYTSGLHSGVPSRFS |
| | GSGSGTDYTLTISSLQPEDFATYFCQQGDYLPWTFGQGTKLEIK |
| 968 | DIQMTQSPSSLSASVGDRVTITCRASQDIYNYLNWYQQKPGKAVKLLIYYTSILHSGVPSRFS |
| | GSGSGTDYTLTISSLQPEDFATYFCQQGDELPWTFGQGTKLEIK |
| 969 | DIQMTQSPSSLSASVGDRVTITCRASQDIYNYLNWYQQKPGKAVKLLIYYTSFLHSGVPSRFS |
| | GSGSGTDYTLTISSLQPEDFATYFCQQGDALPWTFGQGTKLEIK |
| 970 | DIQMTQSPSSLSASVGDRVTITCRASQDIYNYLNWYQQKPGKAVKLLIYYTSILHSGVPSRFS |
| | GSGYGTDYTLTISSLQPEDFATYFCQQGDTLPWTFGQGTKLEIK |

TABLE 23
20E6 VH variants isolated from TRIM library after
2 hour off-rate selection, P2 population

| Seq | |
|---|---|
| ID | |
| NO. | Amino acid sequence |
| 971 | EVQLVQSGAEVKKPGASVKVSCKASGYTFTRYDLHWVRQAPGQGLEWMGRIDPQNGGIKYAQK |
| | FQGRATLTVDTSTSTAYMELSRLRSDDTAVYYCARWDYGGYFDVWGQGTLVTVSS |
| 972 | EVQLVOSGAEVKKPGASVKVSCKASGYTFTYYYMNWVRQAPGQGLEWMGRIDPISGGTKYAQK |
| | FQGRATLTVDTSTSTAYMELSRLRSDDTAVYYCARYDHGGYFDVWGQGTLVTVSS |
| 973 | EVQLVQSGAEVKKPGASVKVSCKASGYTFTSYDLHWVRQAPGQGLEWMGRIDPQSGGIKYAQK |
| | FQGRATLTVDTSTSTAYMELSRLRSDDTAVYYCARWDYGGHFDVWGQGTLVTVSS |
| 974 | EVQLVQSGAEVKKPGASVKVSCKASGYTETSYDMHWVRQAPGQGLEWMGRIDPQTGGVRYAQK |
| | FQGRATLTVDTSTSTAYMELSRLRSDDTAVYYCARWDYGGYFDVWGQGTLVTVSS |
| 975 | EVQLVQSGAEVKKPGASVKVSCKASGYTFTSYDLHWVRQAPGQGLEWMGRIDPQDGGIKYAQK |
| | FQGRATLTVDTSTSTAYMELSRLRSDDTAVYYCARWDYGGYFDVWGQGTLVTVSS |
| 976 | EVQLVQSGAEVKKPGASVKVSCKASGYTFTAYDLHWVRQAPGQGLEWMGRIDPDDGGIRYAQK |
| | FQGRATLTVDTSTSTAYMELSRLRSDDTAVYYCARWDYGGYFDVWGQGTLVTVSS |
| 977 | EVQLVQSGAEVKKPGASVKVSCKASGYTFTSYDMHWVRQAPGQGLEWMGRIDPQSGGIRYAQK |
| | FQGRATLTVDTSTSTAYMELSRLRSDDTAVYYCARWDYGGYFDVWGQGTLVTVSS |
| 978 | EVQLVQSGAEVKKPGASVKVSCKASGYTFTSYDMHWVRQAPGQGLEWMGRIDPQDGDVKYAQK |
| | FQGRATLTVDTSTSTAYMELSRLRSDDTAVYYCARWDYGGYFDVWGQGTLVTVSS |
| 979 | EVQLVQSGAEVKKPGASVKVSCKASGYTFTSYDMHWVRQAPGQGLEWMGRIDPQTGDIKYAQK |
| | FQGRATLTVDTSTSTAYMELSRLRSDDTAVYYCARWDYGGQFDVWGQGTLVTVSS |
| 980 | EVQLVQSGAEVKKPGASVKVSCKASGYTETYYDMHWVRQAPGQGLEWMGRIDPQSGGIIYAQK |
| | FQGRATLTVDTSTSTAYMELSRLRSDDTAVYYCARWDYGGYFDVWGQGTLVTVSS |
| 981 | EVQLVQSGAEVKKPGASVKVSCKASGYTFTSYDMHWVRQAPGQGLEWMGRIDPQSGGVRYAQK |
| | FQGRATLTVDTSTSTAYMELSRLRSDDTAVYYCARWDYGGYFDVWGQGTLVTVSS |
| 982 | EVQLVQSGAEVKKPGASVKVSCKASGYTFTYYDMHWVRQAPGQGLEWMGRIDPQSGGDRYAQK |
| | FQGRATLTVDTSTSTAYMELSRLRSDDTAVYYCARWDYGGYFDVWGQGTLVTVSS |
| 983 | EVQLVQSGAEVKKPGASVKVSCKASGYTFTSYDMHWVRQAPGQGLEWMGRIDPVSGGIKYAQK |
| | FQGRATLTVDTSTSTAYMELSRLRSDDTAVYYCARWDYGGYFDVWGQGTLVTVSS |
| 984 | EVQLVQSGAEVKKPGASVKVSCKASGYTFTSYDMHWVRQAPGQGLEWMGRIDPYSGGIKYAQK |
| | FQGRATLTVDTSTSTAYMELSRLRSDDTTVYYCARWDYGGQFDVWGQGTLVTVSS |
| 985 | EVQLVQSGAEVKKPGASVKVSCKASGYTFTYYDVHWVRQAPGQGLEWMGRIDPQSGGGRYAQK |
| | FQGRATLTVDTSTSTAYMELSRLRSDDTAVYYCARWDYGGYFDVWGQGTLVTVSS |
| 986 | EVQLVQSGAEVKKPGASVKVSCKASGYTFTKYDMHWVRQAPGQGLEWMGRIDPQTGGVKYAQK |
| | FQGRATLTVDTSTSTAYMELSRLRSDDTAVYYCARWDYGGYFDVWGQGTLVTVSS |
| 987 | EVQLVQSGAEVKKPGASVKVSCKASGYTFTSYWMQWVRQAPGQGLEWMGRIDPQDGDIKYAQK |
| | FQGRATLTVDTSTSTAYMELSRLRSDDTAVYYCARWDYGGYFDVWGQGTLVTVSS |
| 988 | EVQLVQSGAEVKKPGASVKVSCKASGYTFTSYDMHWVRQAPGQGLEWMGRIDPESGGTKYAQK |
| | FQGRATLTVDTSTSTAYMELSRLRSDDTAVYYCARWDYGGYFDVWGQGTLVTVSS |
| 989 | EVQLVQSGAEVKKPGASVKVSCKASGYTFTSYDMHWVRQAPGQGLEWMGRIDPQSGGIKYAQK |
| | FQGRATLTVDTSTSTAYMELSRLRSDDTAVYYCARWHTGGQFDVWGQGTLVTVSS |
| 990 | EVQLVQSGAEVKKPGASVKVSCKASGYTFTSYDMHWVRQAPGQGLEWMGRIDPQSGGTKYAQK |
| | FQGRATLTVDTSTSTAYMELSRLRSDDTAVYYCARWDYGGYFDVWGQGTLVTVSS |
| 991 | EVQLVQSGAEVKKPGASVKVSCKASGYTFTRYDLHWVRQAPGQGLEWMGRIDPPSGGVLYAQK |
| | FQGRATLTVDTSTSTAYMELSRLRSDDTAVYYCARWDYGGYFDVWGQGTLVTVSS |
| 992 | EVQLVQSGAEVKKPGASVKVSCKASGYTFTSYDMHWVRQAPGQGLGWMGRIDPQSGGIKYAQK |
| | FQGRATLTVDTSTSTAYMELSRLRSDDTAVYYCARWDYGGFFDVWGQGTLVTVSS |
| 993 | EVQLVQSGAEVKKPGASVKVSCKASGYTFTQYDMHWVRQAPGQGLEWMGRIDPQSGGIKYAQK |
| | FQGRATLTVDTSTSTAYMELSRLRSDDTAVYYCARYDYGGYFDVWGQGTLVTVSS |
| 994 | EVQLVQSGAEVKKPGASVKVSCKASGYTFTEYDMHWVRQAPGQGLEWMGRIDPQSGGQKYAQK |
| | FQGRATLTVDTSTSTAYMELSRLRSDDTAVYYCARWDYGGFFDVWGQGTLATVSS |
| 995 | EVQLVQSGAEVKKPGASVKVSCKASGYTFTNYDMHWVRQAPGQGLEWMGRIDPQVGGIKYAQK |
| | FQGRATLTVDTSTSTAYMELSRLRSDDTAVYYCARWDYGGYFDVWGQGTLVTVSS |
| 996 | EVQLVQSGAEVKKPGASVKVSCKASGYTFTHYFMNWVRQAPGQGLEWMGRIDPQSGSIRYAQK |
| | FQGRATLTVDTSTSTAYMELSRLRSDDTAVYYCARWDYGGYFDVWGQGTLVTVSS |
| 997 | EVQLVQSGAEVKKPGASVKVSCKASGYTFTSYDMHWVRQAPGQGLEWMGRIDPNSGGIKYAQK |
| | FQGRATLTVDTSTSTAYMELSRLRSDDTAVYYCARWDYGGYFDVWGQGTLVTVSS |
| 998 | EVQLVQSGAEVKKPGASVKVSCKASGYTFTYYDLHWVRQAPGQGLEWMGRIDPQSGGIKYAQK |
| | FQGRATLTVDTSTSTAYMELSRLRSDDTAVYYCARWDYGGYFDVWGQGTLVTVSS |
| 999 | EVQLVQSGAEVKKPGASVKVSCKASGYTFTSYDMHWVRQAPGQGLEWMGRIDPQSGGQKYAQK |
| | FQGRATLTVDTSTSTAYMELSRLRSDDTAVYYCARWDYGGYFDVWGQGTLVTVSS |
| 1000 | EVRLVQSGAEVKKPGASVKVSCKASGYTFTSYDMHWVRQAPGQGLEWMGRIDPQSGGVKYAQK |
| | FQGRATLTVDTSTSTAYMELSRLRSDDTAVYYCARWDYGGYFDVWGQGTLVTVSS |
| 1001 | EVQLVQSGAEVKKPGASVKVSCKASGYTFTSYDTHWVRQAPGQGLEWMGRIDPQSGGIKYAQK |
| | FQGRATLTVDTSTSTAYMELSRLRSDDTAVYYCARWDYGGYFDVWGQGTLVTVSS |
| 1002 | EVQLVQSGAEVKKPGASVKVSCKASGYTFTSYDMHWVRQAPGQGLEWMGRIDPQSGGIKYAQK |
| | FQGRATLTVDTSTSTAYMELSRLRSDDTAVYYCARWDYGGYFDVWGQGTLVTVSS |
| 1003 | EVQLVQSGAEVKKPGASVKVSCKASGYTFTQYDMHWVRQAPGQGLEWMGRIDPQWGGIKYAQK |
| | FQGRATLTVDTSTSTAYMELSRLRSDDTAVYYCARWDYGGYFDVWGQGTLVTVSS |
| 1004 | EVQLVQSGAEVKKPGASVKVSCKASGYTFTLYDMHWVRQAPGQGLEWMGRIDPQSGGIKYAQK |
| | FQGRATLTVDTSTSTAYMELSRLRSDDTAVYYCARWDYGGYFDVWGQGTLVTVSS |
| 1005 | EVQLVQSGAEVKKPGASVKVSCKASGYTFTYYDMHWVRQAPGQGLEWMGRIDPQSGGIKYAQK |
| | FQGRATLTVDTSTSTAYMELSRLRSDDTAVYYCARWDYGGYFDVWGQGTLVTVSS |
| 1006 | EVQLVQSGAEVKKPGASVKVSCKASGYTFTSYDMHWVRQAPGQGLEWMGRIDPQSGGIRYAQK |
| | FQGRATLTVDTSTSTAYMELSRLRSDDTAVYYCARYDYGGYFDVWGQGTLVTVSS |
| 1007 | EVQLVQSGAEVKKPGASVKVSCKASGYTFTSYDIHWVRQAPGQGLEWMGRIDPQSGGIKYAQK |
| | FQGRATLTVDTSTSTAYMELSRLRSDDTAVYYCARWDYGGYFDVWGQGTLVTVSS |
| 1008 | EVQLVQSGAEVKKPGASVKVSCKASGYTFTSYDMHWVRQAPGQGLEWMGRIDPQSGGIKYAQK |
| | FQGRATLTVDTSTSTAYMELSRLRSDDTAVYYCARWDYGGYFDVWGQGTLVTVSS |
| 1009 | EVQLVQSGAEVKKPGASVKVSCKASGYTFTRYDMHWVRQAPGQGLEWMGRIDPKSGGIKYAQK |
| | FQGRATLTVDTSTSTAYMELSRLRSDDTAVYYCARWDYGGYFDVWGQGTLVTVSS |

TABLE 24
20E6 VL variants isolated from TRIM library after
2 hour off-rate selection, P2 population

| Seq | |
|---|---|
| ID | |
| NO. | Amino acid sequence |
| 1010 | DIQMTQSPSSLSASVGDRVTITCRASQDIYNYLNWYQQKPGKAVKLLIYYTSVLHSGVPSRF |
| | SGSGSGTDYTLTISSLQPEDFATYFCQQGDTLPWTFGQGTKLEIK |
| 1011 | DIQMTQSPSSLSASVGDRVTITCRASQDIYNYLNWYQQKPGKAVKLLIYYTSGLHSGVPSRF |
| | SGSGSGTDYTLTISSLQPEDFATYFCQQGDTLPWTFGQGTKLEIK |
| 1012 | DIQMTQSPSSLSASVGDRVTITCRASQDIYSYLNWYQQKPGKAVKLLIYYTSLLHSGVPSRF |
| | SGSGSGTDYTLTISSLQPEDFATYFCQQGDLLPWTFGQGTKLEIK |
| 1013 | DIQMTQSPSSLSASVGDRVTITCRASQDIYNYLNWYQQKPGKAVKLLIYYTSVLHSGVPSRF |
| | SGSGSGTDYTLTISSLOPEDFATYFCQQGDELPWTFGQGTKLEIK |
| 1014 | DIQMTQSPSSLSASVGDRVTITCRASQDIFNYLNWYQQKPGKAVKLLIYYTSNLHSGVPSRF |
| | SGSGSGTDYTLTISSLQPEDFATYFCQQGDTLPWTFGQGTKLEIK |
| 1015 | DIQMTQSPSSLSASVGDRVTITCRASQDIFNYLNWYQQKPGKAVKLLIYYTSILHSGVPSRF |
| | SGSGSGTDYTLTISSLQPEDFATYFCQQGDTLPWTFGQGTKLEIK |
| 1016 | DIQMTQSPSSLSASVGDRVTITCRASQDIYNYLNWYQQKPGKAVKLLIYYTSLLHSGVPSRF |
| | SGSGSGTDYTLTISSLQPEDFATYFCQQGDELPWTFGQGTKLEIK |
| 1017 | DIQMTQSPSSLSASVGDRVTITCRASQDIYNYLNWYQQKPGKAVKLLIYYTSQLHSGVPSRF |
| | SGSGSGTDYTLTISSLQPEDFATYFCQQGDTLPWTFGQGTKLEIK |
| 1018 | DIQMTQSPSSLSASVGDRVTITCRASQDIYNYLNWYQQKPGKAVKLLIYYTSGLHSGVPSRF |
| | SGSGSGTDYTLTISSLOPEDFATYFCQQGDELPWTFGQGTKLEIK |
| 1019 | DIQMTQSPSSLSASVGDRVTITCRASQDIFNYLNWYQQKPGKAVKLLIYYTSVLHSGVPSRF |
| | SGSGSGTDYTLTISSLOPEDFATYFCQQGDELPWTFGQGTKLEIK |
| 1020 | DIQMTQSPSSLSASVGDRVTITCRASQDIYNYLNWYQQKPGKAVKLLIYYTSILHSGVPSRF |
| | SGSGSGTDYTLTISSLQPEDFATYFCQQGDALPWTFGQGTKLEIK |
| 1021 | DIQMTQSPSSLSASVGDRVTITCRASQDIYHYLNWYQQKPGKAVKLLIYYTSELHSGVPSRF |
| | SGSGSGTDYTLTISSLQPEDFATYFCQQGDELPWTFGQGTKLEIK |
| 1022 | DIQMTQSPSSLSASVGDRVTITCRASQDIFNYLNWYQQKPGKAVKLLIYYTSGLHSGVPSRF |
| | SGSGSGTDYTLTISSLQPEDFATYFCQQGDTLPWTFGQGTKLEIK |
| 1023 | DIQMTQSPSSLSASVGDRVTITCRASQDIYNYLNWYQQKPGKAVKLLIYYTSILHSGVPSRF |
| | SGSGSGTDYTLTISSLQPEDFATYFCQQGDGLPWTFGQGTKLEIK |
| 1024 | DIQMTQSPSSLSASVGDRVTITCRASQDIWNYLNWYQQKPGKAVKLLIYYTSRLHSGVPSRF |
| | SGSGSGTDYTLTISSLQPEDFATYFCQQGDTLPWTFGQGTKLEIK |
| 1025 | DIQMTQSPSSLSASVGDRVTITCRASQDIYNYLNWYQQKPGKAVKLLIYYTSLLHSGVPSRF |
| | SGSGSGTDYTLTISSLQPEDFATYFCQQGDTLPWTFGQGTKLDIK |
| 1026 | DIQMTQSPSSLSASVGDRVTITCRASQDIYNYLNWYQQKPGKAVKLLIYYTSILHSGVPSRF |
| | SGSGSGTDYTLTISSLQPEDFATYFCQQGDTLPWTFGQGTKLEIK |
| 1027 | DIQMTQSPSSLSASVGDRVTITCRASQDIYKYLNWYQQKPGKAVKLLIYYTSRLHSGVPSRF |
| | SGSGSGTDYTLTISSLQPEDFATYFCQQGDELPWTFGQGTKLEIK |
| 1028 | DIQMTQSPSSLSASVGDRVTITCRASQDIFNYLNWYQQKPGKAVKLLIYYTSRLHSGVPSRF |
| | SGSGSGTDYTLTISSLQPEDFATYFCQQGDTLPWTFGQGTKLEIK |
| 1029 | DIQMTQSPSSLSASVGDRVTITCRASQDIFNYLNWYQQKPGKAVKLLIYYTSSLHSGVPSRF |
| | SGSGSGTDYTLTISSLQPEDFATYFCQQGDGLPWTFGQGTKLEIK |
| 1030 | DIQMTQSPSSLSASVGDRVTITCRASQDIYNYLNWYQQKPGKAVKLLIYYTSYLHSGVPSRF |
| | SGSGSGTDYTLTISSLQPEDFATYFCQQGDTLPWTFGQGTKLEIK |
| 1031 | DIQMTQSPSSLSASVGDRVTITCRASQDIYNYLNWYQQKPGKAVKLLIYYTSELHSGVPSRF |
| | SGSGSGTDYTLTISSLQPEDFATYFCQQGDTLPWTFGQGTKLEIK |
| 1032 | DIQMTQSPSSLSASVGDRVTITCRASQDIYKYLNWYQQKPGKAVKLLIYYTSHLHSGVPSRF |
| | SGSGSGTDYTLTISSLQPEDFATYFCQQGDTLPWTFGQGTKLEIK |
| 1033 | DIQMTQSPSSLSASVGDRVTITCRASQDIFNYLNWYQQKPGKAVKLLIYYTSRLHSGVPSRE |
| | SGSGSGTDYTLTISSLQPEDFATYFCQQGDELPWTFGQGTKLEIK |
| 1034 | DIQMTQSPSSLSASVGDRVTITCRASQDIYNYLNWYQQKPGKAVKLLIYYTSRLHSGVPSRF |
| | SGSGSGTDYTLTISSLQPEDFATYFCQQGDDIPWTFGQGTKLEIK |
| 1035 | DIQMTQSPSSLSASVGDRVTITCRASQDIYNYLNWYQQKPGKAVKLLIYYTSRLHSGVPSRF |
| | SGSGSGTDYTLTISSLQPEDFATYFCQQGDELPWTFGQGTKLEIK |
| 1036 | DIQMTQSPSSLSASVGDRVTITCRASQDIYNYLNWYQQKPGKAVKLLIYYTSRLHSGVPSRF |
| | SGSGSGTDYTLTISSLQPEDFATYFCQQGDTLPWTFGQGTKLEIK |

TABLE 25
20E6 VH variants isolated from TRIM library after
2 hour off-rate selection, P3 population

| Seq | |
|---|---|
| ID | |
| NO. | Amino acid sequence |
| 1037 | EVQLVQSGAEVKKPGASVKVSCKASGYTFTSYDMHWVRQAPGQGLEWMGRIDPQSGDIKYAQK |
| | FQGRATLTVDTSTSTAYMELSRLRSDDTAVYYCARYDHGGYFDVWGQGTLVTVSS |
| 1038 | EVQLVQSGAEVKKPGASVKVSCKASGYTFTKYDIHWVRQAPGQGLEWMGRIDPQSGPIKYAQK |
| | FQGRATLTVDTSTSTAYMELSRLRSDDTAVYYCARWDYGGYFDVWGQGTLVTVSS |
| 1039 | EVQLVOSGAEVKKPGASVKVSCKASGYTFTSYDMHWVRQAPGQGLEWMGRIDPQSGGIKYAQK |
| | FQGRATLTVDTSTSTAYMELSRLRSDDTAVYYCARWSQGGYFDVWGQGTLVTVSS |
| 1040 | EVQLVQSGAEVKKPGASVKVSCKASGYTFTSYDMHWVRQAPGQGLEWMGRIDPQSGGIKYAQK |
| | FQGRATLTVDTSTSTAYMELSRLRSDDTAVYYCARYDHGGYFDVWGQGTLVTVSS |
| 1041 | EVQLVQSGAEVKKPGASVKVSCKASGYTFTQYDMHWVRQAPGQGLEWMGRIDPANGGIKYAQK |
| | FQGRATLTVDTSTSTAYMELSRLRSDDTAVYYCARYDYGGYFDVWGQGTLVTVSS |
| 1042 | EVQLVQSGAEVKKPGASVKVSCKASGYTFTYYDLHWVRQAPGQGLEWMGRIDPLSGGGVYAQK |
| | FQGRATLTVDTSTSTAYMELSRLRSDDTAVYYCARYDHGGYFDVWGQGTLVTVSS |
| 1043 | EVQLVQSGAEVKKPGASVKVSCKASGYTFTFYDIHWVRQAPGQGLEWMGRIDPQSGGIKYAQK |
| | FQGRATLTVDTSTSTAYMELSRLRSDDTAVYYCARWDYGGYFDVWGQGTLVTVSS |
| 1044 | EVQLVQSGAEVKKPGASVKVSCKASGYTFTSYDLHWVRQAPGQGLEWMGRIDPQSGGHKYAQK |
| | FQGRATLTVDTSTSTAYMELSRLRSDDTAVYYCARYDFGGYFDVWGQGTLVTVSS |
| 1045 | EVQLVQSGAEVKKPGASVKVSCKASGYTFTSYDIHWVRQAPGQGLEWMGRIDPYSGGIKYAQK |
| | FQGRATLTVDTSTSTAYMELSRLRSDDTAVYYCARWDYGGYFDVWGQGTLVTVSS |
| 1046 | EVQLVQSGAEVKKPGASVKVSCKASGYTFTSYWMHWVRQAPGQGLEWMGRIDPQSGGIVYAQK |
| | FQGRATLTVDTSTSTAYMELSRLRSDDTAVYYCARWDYGGYFDVWGQGTLVTVSS |
| 1047 | EVQLVQSGAEVKKPGASVKVSCKASGYTFTIYDMHWVRQAPGQGLEWMGRIDPQSGGIKYAQK |
| | FQGRATLTVDTSTSTAYMELSRLRSDDTAVYYCARWEYGGYFDVWGQGTLVTVSS |
| 1048 | EVQLVOSGAEVKKPGASVKVSCKASGYTFTSYDLHWVRQAPGQGLEWMGRIDPQSGGIKYAQK |
| | FQGRATLTVDTSTSTAYMELSRLRSDDTAVYYCARWDQGGYFDVWGQGTLVTVSS |
| 1049 | EVQLVQSGAEVKKPGASVKVSCKASGYTFTSYDINWVRQAPGQGLEWMGRIDPQSGDYKYAQK |
| | FQGRATLTVDTSTSTAYMELSRLRSDDTAVYYCARYDHGGYFDVWGQGTLVTVSS |
| 1050 | EVQLVQSGAEVKKPGASVKVSCKASGYTFTSYDMHWVRQAPGQGLEWMGRIDPQSGGEKYAQK |
| | FQGRATLTVDTSTSTAYMELSRLRSDDTAVYYCARYDYGGYFDVWGQGTLVTVSS |
| 1051 | EVQLVQSGAEVKKPGASVKVSCKASGYTFTSYDMHWVRQAPGQGLEWMGRIDPQTGGIKYAQK |
| | FQGRATLTVDTSTSTAYMELSRLRSDDTAVYYCARYDHGGYFDVWGQGTLVTVSS |
| 1052 | EVQLVQSGAEVKKPGASVKVSCKASGYTFTSYPLHWVRQAPGQGLEWMGRIDPQSGGDIYAQK |
| | FQGRATLTVDTSTSTAYMELSRLRSDDTAVYYCARWDYGGYFDVWGQGTLVTVSS |
| 1053 | EVQLVQSGAEVKKPGASVKVSCKASGYTFTSYWMHWVRQAPGQGLEWMGRIDPQNGGIKYAQK |
| | FQGRATLTVDTSTSTAYMELSRLRSDDTAVYYCARWDYGGYFDVWGQGTLVTVSS |
| 1054 | EVQLVQSGAEVKKPGASVKVSCKASGYTFTSYLLQWVRQAPGQGLEWMGRIDPTSGGDDYAQK |
| | FQGRATLTVDTSTSTAYMELSRLRSDDTAVYYCARWDYGGYFDVWGQGTLVTVSS |
| 1055 | EVQLVQSGAEVKKPGASVKVSCKASGYTFTLYDVHWVRQAPGQGLEWMGRIDPQSGGDKYAQK |
| | FQGRATLTVDTSTSTAYMELSRLRSDDTAVYYCARYDYGGYFDVWGQGTLVTVSS |
| 1056 | EVQLVQSGAEVKKPGASVKVSCKASGYTFTSYDIHWVRQAPGQGLEWMGRIDPQSGGVKYAQK |
| | FQGRATLTVDTSTSTAYMELSRLRSDDTAVYYCARYDYGGYFDVWGQGTLVTVSS |
| 1057 | EVQLVQSGAEVKKPGASVKVSCKASGYTFTSYDMHWVRQAPGQGLEWMGRIDPQSGGSKYAQK |
| | FQGRATLTVDTSTSTAYMELSRLRSDDTAVYYCARYDYGGYFDVWGQGTLVTVSS |
| 1058 | EVQLVQSGAEVKKPGASVKVSCKASGYTFTSYDISWVRQAPGQGLEWMGRIDPQSGGIKYAQK |
| | FQGRATLTVDTSTSTAYMELSRLRSDDTAVYYCARWDYGGYFDVWGQGTLVTVSS |
| 1059 | EVQLVQSGAEVKKPGASVKVSCKASGYTFTSYDMSWVRQAPGQGLEWMGRIDPQGGGTRYAQK |
| | FQGRATLTVDTSTSTAYMELSRLRSDDTAVYYCARWDYAGYFDVWGQGTLVTVSS |
| 1060 | EVQLVQSGAEVKKPGASVKVSCKASGYTFTSYDMHWVRQAPGQGLEWMGRIDPQTGGIKYAQK |
| | FQGRATLTVDTSTSTAYMELSRLRSDDTAVYYCARWDHGGYFDVWGQGTLVTVSS |
| 1061 | EVQLVQSGAEVKKPGASVKVSCKASGYTFTSYDMHWVRQAPGQGLEWMGRIDPDNGGTKYAQK |
| | FQGRATLTVDTSTSTAYMELSRLRSDDTAVYYCARYDHGGYFDVWGQGTLVTVSS |
| 1062 | EVQLVQSGAEVKKPGASVKVSCKASGYTFTSYDVHWVRQAPGQGLEWMGRIDPQSGGILYAQK |
| | FQGRATLTVDTSTSTAYMELSRLRSDDTAVYYCARWEYGGNFDVWGQGTLVTVSS |
| 1063 | EVQLVQSGAEVKKPGASVKVSCKASGYTETHYDSHWVRQAPGQGLEWMGRIDPQSGGIKYAQK |
| | FQGRATLTVDTSTSTAYMELSRLRSDDTAVYYCARYDYGGYFDVWGQGTLVTVSS |
| 1064 | EVQLVQSGAEVKKPGASVKVSCKASGYTFTNYDIHWVRQAPGQGLEWMGRIDPPSGGTKYAQK |
| | FQGRATLTVDTSTSTAYMELSRLRSDDTAVYYCARYDHGGYFDVWGQGTLVTVSS |
| 1065 | EVQLVQSGAEVKKPGASVKVSCKASGYTFTSYDMHWVRQAPGQGLEWMGRIDPQSGGTKYAQK |
| | FQGRATLTVDTSTSTAYMELSRLRSDDTAVYYCARYDHGGYFDVWGQGTLVTVSS |
| 1066 | EVQLVQSGAEVKKPGASVKVSCKASGYTFTTYWMHWVRQAPGQGLEWMGRIDPQSGGSKYAQK |
| | FQGRATLTVDTSTSTAYMELSRLRSDDTAVYYCARWDYGGYFDVWGQGTLVTVSS |
| 1067 | EVQLVQSGAEVKKPGASVKVSCKASGYTFTSYDIHWVRQAPGQGLEWMGRIDPQSGGIKYAQK |
| | FQGRATLTVDTSTSTAYMELSRLRSDDTAVYYCARWDYGGYFDVWGQGTLVTVSS |

TABLE 26
20E6 VL variants isolated from TRIM library after
2 hour off-rate selection, P3 population

| Seq | |
|---|---|
| ID | |
| NO. | Amino acid sequence |
| 1068 | DIQMTQSPSSLSASVGDRVTITCRASQDIYNYLNWYQQKPGKAVKLLIYYTSVLHSGVPSRFS |
| | GSGSGTDYTLTISSLQPEDFATYFCQQGDTLPWTFGQGTKLEIK |
| 1069 | DIQMTQSPSSLSASVGDRVTITCRASQDIYNYLNWYQQKPGKAVKLLIYYTSNLHSGVPSRFS |
| | GSGSGTDYTLTISSLQPEDFATYFCQQGDTLPWTFGQGTKLEIK |
| 1070 | DIQMTQSPSSLSASVGDRVTITCRASQDITNYLNWYQQKPGKAVKLLIYYTSRLHSGVPSRFS |
| | GSGSGTDYTLTISSLQPEDFATYFCQQGDTLPWTFGQGTKLEIK |
| 1071 | DIQMTQSPSSLSASVGDRVTITCGASQDIYNYLNWYQQKPGKAVKLLIYYTSRLHSGVPSRFS |
| | GSGSGTDYTLTISSLQPEDFATYFCQQGDTLPWTFGQGTKLEIK |
| 1072 | DIQMTQSPSSLSASVGDRVTITCRASQDITSYLNWYQQKPGKAVKLLIYYTSNLHSGVPSRFS |
| | GSGSGTDYTLTISSLQPEDFATYFCQQGDTLPWTFGQGTKLEIK |
| 1073 | DIQMTQSPSSLSASVGDRVTITCRASQDIYNYLNWYQQKPGKAVKLLIYYTSRLHSGVPSRFS |
| | GSGSGTDYTLTISSLQPEDFATYFCQQGDTLPWTFGQGTKLEIK |
| 1074 | DIQMTQSPSSLSASVGDRVTITCRASQDIFQYLNWYQQKPGKAVKLLIYYTSKLHSGVPSRFS |
| | GSGSGTDYTLTISSLOPEDFATYFCQQGDTLPWTFGQGTKLEIK |
| 1075 | DIQMTQSPSSLSASVGDRVTITCRASQDIYNYLNWYQQKPGKAVKLLIYYTSALHSGVPSRFS |
| | GSGSGTDYTLTINSLQPEDFATYFCQQGDTLPWTFGQGTKLEIK |
| 1076 | DIQMTQSPSSLSASVGDRVTITCRASQDIYNYLNWYQQKPGKAVKLLIYYTSYLHSGVPSRFS |
| | GSGSGTDYTLTISSLOPEDFATYFCQQGDTLPWTFGQGTKLEIK |
| 1077 | DIQMTQSPSSLSASVGDRVTITCRASQDIYNYLNWYQQKPGKAVKLLIYYTSNLHSGVPSRFS |
| | GSGSGTDYTLTISSLQPEDFATYFCQQGDELPWTFGQGTKLEIK |
| 1078 | DIQMTQSPSSLSASVGDRVTITCRASQDIFNYLNWYQQKPGKAVKLLIYYTSILHSGVPSRFS |
| | GSGSGTDYTLTISSLQPEDFATYFCQQGDTLPWTFGQGTKLEIK |
| 1079 | DIQMTQSPSSLSASVGDRVTITCRASQDIYYYLNWYQQKPGKAVKLLIYYTSELHSGVPSRFS |
| | GSGSGTDYTLTISSLQPEDFATYFCQQGDTLPWTFGQGTKLEIK |
| 1080 | DIQMTQSPSSLSASVGDRVTITCRASQDIYEYLNWYQQKPGKAVKLLIYYTSRLHSGVPSRFS |
| | GSGSGTDYTLTISSLQPEDFATYFCQQGDTLPWTFGQGTKLEIK |
| 1081 | DIQMTQSPSSLSASVGDRVTITCRASQDIYYYLNWYQQKPGKAVKLLIYYTSRLHSGVPSRFS |
| | GSGSGTDYTLTISSLQPEDFATYFCQQGDTLPWTFGQGTKLEIK |
| 1082 | DIQMTQSPSSLSASVGDRVTITCRASQDIYNYLNWYQQKPGKAVKLLIYYTSRLHSGVPSRFS |
| | GSGSGTDYTLTISSLQPEDFATYFCQQGDTPPWTFGQGTKLEIK |
| 1083 | DIQMTQSPSSLSASVGDRVTITCRASQDIYNYLNWYQQKPGKAVKLLIYYTSSLHSGVPSRFS |
| | GSGSGTDYTLTISSLQPEDFATYFCQQGDTLPWTFGQGTKLEIK |
| 1084 | DIQMTQSPSSLSASVGDRVTITCRASQDIYNYLNWYQQKPGKAVKLLIYYTSRLHSGVPSRFS |
| | GSGSGTDYTLTISSLQPEDFATYFCQQGDTQPWTFGQGTKLEIK |
| 1085 | DIQMTQSPSSLSVSVGDRVTITCGASQDIFNYLNWYQQKPGKAVKLLIYYTSRLHSGVPSRFS |
| | GSGSGTDYTLTISSLQPEDFATYFCQQGDGLPWTFGQGTKLEIK |
| 1086 | DIQMTQSPSSLSASVGDRVTITCRASQDIFHYLNWYQQKPGKAVKLLIYYTSILHSGVPSRFS |
| | GSGSGTDYTLTISSLQPEDFATYFCQQGDTLPWTFGQGTKLEIK |
| 1087 | DIQMTQSPSSLSASVGDRVTITCRASQDIYNYLNWYQQKPGKAVKLLIYYTSRLHSGVPSRFS |
| | GSGSGTDYTLTISSLQPEDFATYFCQQGDDLPWTFGQGTKLEIK |
| 1088 | DIQMTQSPSSLSASVGDRVTITCRASQDIYNYLNWYQQKPGKAVKLLIYYTSHLHSGVPSRFS |
| | GSGSGTDYTLTISSLQPEDFATYFCQQGDTLPWTFGQGTKLEIK |

TABLE 27
20E6 VH variants isolated from TRIM library after
2 hour off-rate selection, P4 population

| Seq | |
|---|---|
| ID | |
| NO. | Amino acid sequence |
| 1089 | EVQLVQSGAEVKKPGASVKVSCKASGYTFTSYDMHWVRQAPGQGLEWMGRIDPQGGSVKYAQ |
| | KFQGRATLTVDTSTSTAYMELSRLRSDDTAVYYCARWDHGGNFDVWGQGTLVTVSS |
| 1090 | EVQLVQSGAEVKKPGASVKVSCKASGYTFTSYQVHWVRQAPGQGLEWMGRIDPQSGGIKYAQ |
| | KFQGRATLTVDTSTSTAYMELSRLRSDDTAVYYCARWDYGGYFDVWGQGTLVTVSS |
| 1091 | EVQLVQSGAEVKKPGASVKVSCKASGYTFTDYDMHWVRQAPGQGLEWMGRIDPVSGSIRYAQ |
| | KFQGRATLTVDTSTSTAYMELSRLRSDDTAVYYCARYDHGGYFDVWGQGTLVTVSS |
| 1092 | EVQLVQSGAEVKKPGASVKVSCKASGYTFTSYDMHWVRQAPGQGLEWMGRIDPQSGGIKYAQ |
| | KFQGRATLTVDTSTSTAYMELSRLRSDDTAVYYCARWDYGGYFDVWGQGTLVTVSS |
| 1093 | EVQLVQSGAEVKKPGASVKVSCKASGYTFTSYEIVWVRQAPGQGLEWMGRIDPQSGDIAYAQ |
| | KFQGRATLTVDTSTSTAYMELSRLRSDDTAVYYCARWDHGGYFDVWGQGTLVTVSS |
| 1094 | EVQLVQSGAEVKKPGASVKVSCKASGYTFTRYDLHWVRQAPGQGLEWMGWIDPKSGSLKYAQ |
| | KFQGRATLTVDTSTSTAYMELSRLRSDDTAVYYCARWDYGGYFDVWGQGTLVTVSS |
| 1095 | EVQLVQSGAEVKKPGASVKVSCKASGYTFTTYWMHWVRQAPGQGLEWMGRIDPQRGDIKYAQ |
| | KFQGRATLTVDTSTSTAYMELSRLRSDDTAVYYCARWDYGGFFDVWGQGTLVTVSS |
| 1096 | EVQLVQSGAEVKKPGASVKVSCKASGYTFTSYWLHWVRQAPGQGLEWMGRIDPQSGGIIYAQ |
| | KFQGRATLTVDTSTSTAYMELSRLRSDDTAVYYCARWDYGGYFDVWGQGTLVTVSS |
| 1097 | EVQLVQSGAEVKKPGASVKVSCKASGYTFTDYDMHWVROAPGQGLEWMGRIDPQSGDHDYAQ |
| | KFQGRATLTVDTSTSTAYMELSRLRSDDTAVYYCARYDHGGYFDVWGQGTLVTVSS |
| 1098 | EVQLVQSGAEVKKPGASVKVSCKASGYTFTSYDMHWVRQAPGQGLEWMGRIDPQSGGHKYAQ |
| | KFQGRATLTVDTSTSTAYMELSRLRSDDTAVYYCARYDHGGYFDVWGQGTLVTVSS |
| 1099 | EVQLVQSGAEVKKPGASVKVSCKASGYTFTSYDMQWVRQAPGQGLEWMGRIDPISGSIKYAQ |
| | KFQGRATLTVDTSTSTAYMELSRLRSDDTAVYYCARYDHGGYFDVWGQGTLVTVSS |
| 1100 | EVQLVQSGAEVKKPGASVKVSCKASGYTFTSYEMQWVRQAPGQGLEWMGRIDPQSGSIKYAQ |
| | KFQGRATLTVDTSTSTAYMELSRLRSDDTAVYYCARWDYGGYFDVWGQGTLVTVSS |
| 1101 | EVQLVQSGAEVKKPGASVKVSCKASGYTFTGYDLHWVRQAPGQGLEWMGRIDPQSGDDRYAQ |
| | KFQGRATLTVDTSTSTAYMELSRLRSDDTAVYYCARWDEGGLFDVWGQGTLVTVSS |
| 1102 | EVQLVQSGAEVKKPGASVKVSCKASGYTFTSYDMHWVRQAPGQGLEWMGRIDPYGGGIKYAQ |
| | KFQGRATLTVDTSTSTAYMELSRLRSDDTAVYYCARYDHGGYFDVWGQGTLVTVSS |
| 1103 | EVQLVQSGAEVKKPGASVKVSCKASGYTFTSYDMHWVRQAPGQGLEWMGRIDPQGGNYYAQK |
| | FQGRATLTVDTSTSTAYMELSRLRSDDTAVYYCARWDYGGYFDVWGQGTLVTVSS |
| 1104 | EVQLVQSGAEVKKPGASVKVSCKASGYTFTSYDMHWVRQAPGQGLEWMGRIDPDSGGIKYAQ |
| | KFQGRATLTVDTSTSTAYMELSRLRSDDTAVYYCARWDYSGYFDVWGQGTLVTVSS |
| 1105 | EVQLVQSGAEVKKPGASVKVSCKASGYTFTSYFMSWVRQAPGQGLEWMGRIDPQSGGIKYAQ |
| | KFQGRATLTVDTSTSTAYMELSRLRSDDTAVYYCARWDYAGYFDVWGQGTLVTVSS |
| 1106 | EVQLVQSGAEVKKPGASVKVSCKASGYTFTSYDMHWVRQAPGQGLEWMGRIDPQSGGIKYAQ |
| | KFQGRATLTVDTSTSTAYMELSRLRSDDTAVYYCARYDHGGYFDVWGQGTLVTVSS |
| 1107 | EVQLVQSGAEVKKPGASVKVSCKASGYTFTAYDLHWVRQAPGQGLEWMGRIDPQSGGIKYAQ |
| | KFQGRATLTVDTSTSTAYMELSRLRSDDTAVYYCARWDQGGYFDVWAQGTLVTVSS |
| 1108 | EVQLVQSGAEVKKPGASVKVSCKASGYTFTPYQMHWVRQAPGQGLEWMGRIDPQSGGIPYAQ |
| | KFQGRATLTVDTSTSTAYMELSRLRSDDTAVYYCARWDYGGYFDVWGQGTLVTVSS |
| 1109 | EAQLVQSGAEVKKPGASVKVSCKASGYTFTSYWMHWVRQAPGQGLEWMGRIDPQSGGIKYAQ |
| | KFQGRATLTVDTSTSTAYMELSRLRSDDTAVYYCARWDYGGYFDVWGQGTLVTVSS |
| 1110 | EVQLVQSGAEVKKPGASVKVSCKASGYTFTSYDLHWVRQAPGQGLEWMGRIDPQSGGIKYAQ |
| | KFQGRATLTVDTSTSTAYMELSRLRSDDTAVYYCARYDQGGYFDVWGQGTLVTVSS |
| 1111 | EVQLVQSGAEVKKPGASVKVSCKASGYTFTSYDMHWVRQAPGQGLEWMGRIDPQSGGIIYAQ |
| | KFQGRATLTVDTSTSTAYMELSRLRSDDTAVYYCARYDHGGYFDVWGQGTLVTVSS |
| 1112 | EVQLVQSGAEVKKPGASVKVSCKASGYTFTNYWMHWVRQAPGQGLEWMGRIDPQSGGIKYAQ |
| | KFQGRATLTVDTSTSTAYMELSRLRSDDTAVYYCARWDYGGYFDVWGQGTLVTVSS |
| 1113 | EVQLVQSGAEVKKPGASVKVSCKASGYTFTHYDMHWVRQAPGQGLEWMGRIDPQSGGHKYAQ |
| | KFQGRATLTVDTSTSTAYMELSRLRSDDTAVYYCARWDHGGYFDVWGQGTLVTVSS |

TABLE 28
20E6 VL variants isolated from TRIM library after
2 hour off-rate selection, P4 population

| Seq | |
|---|---|
| ID | Amino acid sequence |
| 1114 | DIQMTQSPSSLSASVGDRVTITCRASQDIYSYLNWYQQKPGKAVKLLIYYTSNLHSGVPSRFS |
| | GSGSGTDYTLTISSLQPEDFATYFCQQGDTLPWTFGQGTKLEIK |
| 1115 | DIQMTQSPSSLSASVGDRVTITCRASQDIFNYLNWYQQKPGKAVKLLIYYTSRLHSGVPSRFS |
| | GSGSGTDYTLTISSLQPEDFATYFCQQGDTLPWTFGQGTKLEIK |
| 1116 | DIQMTQSPSSLSASVGDRVTITCRASQDITNYLNWYQQKPGKAVKLLIYYTSRLHSGVPSRFS |
| | GSGSGTDYTLTISSLQPEDFATYFCQQGDTLPWTFGQGTKLEIK |
| 1117 | DIQMTQSPSSLSASVGDRVTITCRASQDIFSYLNWYQQKPGKAVKLLIYYTSILHSGVPSRFS |
| | GSGSGTDYTLTISSLQPEDFATYFCQQGDTLPWTFGQGTKLEIK |
| 1118 | DIQMTQSPSSLSASVGDRVTITCRASQDITNYLNWYQQKPGKAVKLLIYYTSQLHSGVPSRFS |
| | GSGSGTDYTLTISSLQPEDFATYFCQQGDELPWTFGQGTKLEIK |
| 1119 | DIQMTQSPSSLSASVGDRVTITCRASQDIYNYLNWYQQKPGKAVKLLIYYTSYLHSGVPSRFS |
| | GSGSGTDYTLTISSLQPEDFATYFCQQGDTQPWTFGQGTKLEIK |
| 1120 | DIQMTQSPSSLSASVGDRVTITCRASQDIYSYLNWYQQKPGKAVKLLIYYTSQLHSGVPSRFS |
| | GSGSGTDYTLTISSLQPEDFATYFCQQGDTLPWTFGQGTKLEIK |
| 1121 | DIQMTQSPSSLSASVGDRVTITCRASQDIYNYLNWYQQKPGKAVKLLIYYTSRLHSGVPSRFS |
| | GSGSGTDYTLTISSLQPEDFATYFCQQGDTQPWTFGQGTKLEIK |
| 1122 | DIQMTQSPSSLSASVGDRVTITCRASQDIYHYLNWYQQKPGKAVKLLIYYTSRLHSGVPSRFS |
| | GSGSGTDYTLTISSLQPEDFATYFCQQGDGLPWTFGQGTKLEIK |
| 1123 | DIQMTQSPSSLSASVGDRVTITCRASQDIYSYLNWYQQKPGKAVKLLIYYTSGLHSGVPSRFS |
| | GSGSGTDYTLTISSLOPEDFATYFCQQGDTLPWTFGQGTKLEIK |
| 1124 | DIQMTQSPSSLSASVGDRVTITCRASQDIYNYLNWYQQKPGKAVKLLIYYTSVLHSGVPSRFS |
| | GSGSGTDYTLTISSLQPEDFATYFCQQGDTLPWTFGQGTKLEIK |
| 1125 | DIQMTQSPSSLSASVGDRVTITCRASQDIFYYLNWYQQKPGKAVKLLIYYTSRLHSGVPSRFS |
| | GSGSGTDYTLTISSLQPEDFATYFCQQGDTLPWTFGQGTKLEIK |
| 1126 | DIQMTQSPSSLSASVGDRVTITCRASQDIYNYLNWYQQKPGKAVKLLIYYTSRLHSGVPSRFS |
| | GSGSGTDYTLTISSLQPEDFATYFCQQGDALPWTFGQGTKLEIK |
| 1127 | DIQMTQSPSSLSASVGDRVTITCRASQDIYNYLNWYQQKPGKAVKLLIYYTSHLHSGVPSRFS |
| | GSGSGTDYTLTISSLQPEDFATYFCQQGDTLPWTFGQGTKLEIK |
| 1128 | DIQMTQSPSSLSASVGDRVTITCRASQDITNYLNWYQQKPGKAVKLLIYYTSELHSGVPSRFS |
| | GSGSGTDYTLTISSLQPEDFATYFCQQGDTLPWTFGQGTKLEIK |
| 1129 | DIQMTQSPSSLSASVGDRVTITCRASQDIYNYLNWYQQKPGKAVKLLIYYTSRLHSGVPSRFS |
| | GSGSGTDYTLTISSLQPEDFATYFCQQGDTLPWTFGQGTKLEIK |
| 1130 | DIQMTQSPSSLSASVGDRVTITCRASQDITKYLNWYQQKPGKAVKLLIYYTSRLHSGVPSRFS |
| | GSGSGTDYTLTISSLQPEDFATYFCQQGDTLPWTFGQGTKLEIK |
| 1131 | DIQMTQSPSSLSASVGDRVTITCRASQDIYKYLNWYQQKPGKAVKLLIYYTSELHSGVPSRFS |
| | GSGSGTDYTLTISSLOPEDFATYFCQQGDTLPWTFGQGTKLEIK |
| 1132 | DIQMTQSPSSLSASVGDRVTITCRASQDIFSYLNWYQQKPGKAVKLLIYYTSRLHSGVPSRFS |
| | GSGSGTDYTLTISSLQPEDFATYFCQQGDTLPWTFGQGTKLEIK |
| 1133 | DIQMTQSPSSLSASVGDRVTITCRASQDIYHYLNWYQQKPGKAVKLLIYYTSRLHSGVPSRFS |
| | GSGSGTDYTLTISSLQPEDFATYFCQQGDTLPWTFGQGTKLEIK |
| 1134 | DIQMTQSPSSLSASVGDRVTITCRASQDIYNYLNWYQQKPGKAVKLLIYYTSALHSGVPSRFS |
| | GSGSGTDYTLTISSLQPEDFATYFCQQGDTLPWTFGQGTKLEIK |
| 1135 | DIQMTQSPSSLSASVGDRVTITCRASQDIYYYLNWYQQKPGKAVKLLIYYTSRLHSGVPSRFS |
| | GSGSGTDYTLTISSLQPEDFATYFCQQGDTLPWTFGQGTKLEIK |
| 1136 | DIQMTQSPSSLSASVGDRVTITCRASQDIYNYLNWYQQKPGKAVKLLIYYTSRLHSGVPSRFS |
| | GSGSGTDYTLTISSLQPEDFATYFCQQGDTVPWTFGQGTKLEIK |
| 1137 | DIQMTQSPSSLSASVGDRVTITCRASQDIYNYLNWYQQKPGKAVKLLIYYQSALHSGVPSRFS |
| | GSGSGTDYTLTISSLQPEDFATYFCQQGDTLPWTFGQGTKLEIK |

TABLE 29
20E6 VH variants isolated from TRIM library
after 12 hour off-rate selection

| Seq ID NO. | Amino acid sequence |
|---|---|
| 1138 | EVQLVQSGAEVKKPGASVKVSCKASGYTFTHYDMHWVRQAPGQGLEWMGRIDPQGGGIKYAQK |
| | FQGRATLTVDTSTSTAYMELSRLRSDDTAVYYCARWDYGGQFDVWGQGTLVTVSS |
| 1139 | EVQLVQSGAEVKKPGASVKVSCKASGYTFTSYLMQWVRQAPGQGLEWMGRIDPQDGDIKYAQK |
| | FQGRATLTVDTSTSTAYMELSRLRSDDTAVYYCARWDHGGYFDVWGQGTLVTVSS |
| 1140 | EVQLVQSGAEVKKPGASVKVSCKASGYTFTSYDMHWVRQAPGQGLEWMGRIDPQDGGIKYAQK |
| | FQGRATLTVDTSTSTAYMELSRLRSDDTAVYYCARWDYGGYFDVWGQGTLVTVSS |
| 1141 | EVQLVQSGAEVKKPGASVKVSCKASGYTFTSYYMNWVRQAPGQGLEWMGRIDPDDGDIKYAQK |
| | FQGRATLTVDTSTSTAYMELSRLRSDDTAVYYCARWDYGGYFDVWGQGTLVTVSS |
| 1142 | EVQLVQSGAEVKKPGASVKVSCKASGYTFTSYDMHWVRQAPGQGLEWMGRIDPQSGGIRYAQK |
| | FQGRATLTVDTSTSTAYMELSRLRSDDTAVYYCARWDYGGYFDVWGQGTLVTVSS |
| 1143 | EVQLVQSGAEVKKPGASVKVSCKASGYTFTKYLMSWVRQAPGQGLEWMGRIDPQDGDIKYAQK |
| | FQGRATLTVDTSTSTAYMELSRLRSDDTAVYYCARWDYGGYFDVWGQGTLVTVSS |
| 1144 | EVQLVQSGAEVKKPGASVKVSCKASGYTFTSYDMHWVRQAPGQGLEWMGRIDPQDGGSKYAQK |
| | FQGRATLTVDTSTSTAYMELSRLRSDDTAVYYCARWDYGGYFDVWGQGTLVTVSS |
| 1145 | EVQLVQSGAEVKKPGASVKVSCKASGYTFTSYYINWVRQAPGQGLEWMGRIDPQSGGIKYAQK |
| | FQGRATLTVDTSTSTAYMELSRLRSDDTAVYYCARYDHGGYFDVWGQGTLVTVSS |
| 1146 | EVQLVQSGAEVKKPGASVKVSCKASGYTFTSYDLHWVRQAPGQGLEWMGRIDPYDGGTKYAQK |
| | FQGRATLTVDTSTSTAYMELSRLRSDDTAVYYCARWDYGGYFDVWGQGTLVTVSS |
| 1147 | EVQLVQSGAEVKKPGASVKVSCKASGYTFTNYDMHWVRQAPGQGLEWMGRIDPQGGGIRYAQK |
| | FQGRATLTVDTSTSTAYMELSRLRSDDTAVYYCARWDYGGYFDVWGQGTLVTVSS |
| 1148 | EVQLVQSGAEVKKPGASVKVSCKASGYTFTSYDMHWVRQAPGQGLEWMGRIDPPSGGIKYAQK |
| | FQGRATLTVDTSTSTAYMELSRLRSDDTAVYYCARWHTGGYFDVWGQGTLVTVSS |
| 1149 | EVQLVQSGAEVKKPGASVKVSCKASGYTFTSYDMHWVRQAPGQGLEWMGRIDPDGGGIKYAQK |
| | FQGRATLTVDTSTSTAYMELSRLRSDDTAVYYCARWDYGGQFDVWGQGTLVTVSS |
| 1150 | EVQLVQSGAEVKKPGASVKVSCKASGYTFTSYLMQWVRQAPGQGLEWMGRIDPSDGGTKYAQK |
| | FQGRATLTVDTSTSTAYMELSRLRSDDTAVYYCARWDYGGYFDVWGQGTLVTVSS |
| 1151 | EVQLVQSGAEVKKPGASVKVSCKASGYTFTSYLMQWVRQAPGQGLEWMGRIDPIDGGIKYAQK |
| | FQGRATLTVDTSTSTAYMELSRLRSDDTAVYYCARWHYGGYFDVWGQGTLVTVSS |
| 1152 | EVQLVQSGAEVKKPGASVKVSCKASGYTFTSYYMNWVRQAPGQGLEWMGRIDPFDGSIKYAQK |
| | FQGRATLTVDTSTSTAYMELSRLRSDDTAVYYCARWDYGGYFDVWGQGTLVTVSS |
| 1153 | EVQLVQSGAEVKKPGASVKVSCKASGYTFTYYDMHWVRQAPGQGLEWMGRIDPQSGGIKYAQK |
| | FQGRATLTVDTSTSTAYMELSRLRSDDTAVYYCARWDYGGQFDVWGQGTLVTVSS |
| 1154 | EVQLVQSGAEVKKPGASVKVSCKASGYTFTHYDMHWVRQAPGQGLEWMGRIDPVSGGIKYAQK |
| | FQGRATLTVDTSTSTAYMELSRLRSDDTAVYYCARWDYGGQFDVWGQGTLVTVSS |
| 1155 | EVQLVQSGAEVKKPGASVKVSCKASGYTFTSYDIHWVRQAPGQGLEWMGRIDPISGGIKYAQK |
| | FQGRATLTVDTSTSTAYMELSRLRSDDTAVYYCARWDYGGYFDVWGQGTLVTVSS |
| 1156 | EVQLVQSGAEVKKPGASVKVSCKASGYTFTSYYMNWVRQAPGQGLEWMGRIDPQSGGVKYAQK |
| | FQGRATLTVDTSTSTAYMELSRLRSDDTAVYYCARWHYGGQFDVWGQGTLVTVSS |
| 1157 | EVQLVQSGAEVKKPGASVKVSCKASGYTETSYDMHWVRQAPGQGLEWMGRIDPQSGGQKYAQK |
| | FQGRATLTVDTSTSTAYMELSRLRSDDTAVYYCARWDYGGQFDVWGQGTLVTVSS |
| 1158 | EVQLVQSGAEVKKPGASVKVSCKASGYTFTRYDMHWVRQAPGQGLEWMGRIDPQSGGTKYAQK |
| | FQGRATLTVDTSTSTAYMELSRLRSDDTAVYYCARWHTGGQFDVWGQGTLVTVSS |
| 1159 | EVQLVQSGAEVKKPGASVKVSCKASGYTETHYDMHWVRQAPGQGLEWMGRIDPQTGGIKYAQK |
| | FQGRATLTVDTSTSTAYMELSRLRSDDTAVYYCARWDYGGQFDVWGQGTLVTVSS |
| 1160 | EVQLVQSGAEVKKPGASVKVSCKASGYTFTQYDLHWVRQAPGQGLEWMGRIDPQTGGIKYAQK |
| | FQGRATLTVDTSTSTAYMELSRLRSDDTAVYYCARWDYGGQFDVWGQGTLVTVSS |
| 1161 | EVQLVQSGAEVKKPGASVKVSCKASGYTFTSYDLHWVRQAPGQGLEWMGRIDPYSGGIKYAQK |
| | FQGRATLTVDTSTSTAYMELSRLRSDDTAVYYCARWDYGGYFDVWGQGTLVTVSS |
| 1162 | EVQLVQSGAEVKKPGASVKVSCKASGYTFTSYDMHWVRQAPGQGLEWMGRIDPISGGIKYAQK |
| | FQGRATLTVDTSTSTAYMELSRLRSDDTAVYYCARWDYGGYFDVWGQGTLVTVSS |
| 1163 | EVQLVQSGAEVKKPGASVKVSCKASGYTFTSYDKHWVRQAPGQGLEWMGRIDPASGGIRYAQK |
| | FQGRATLTVDTSTSTAYMELSRLRSDDTAVYYCARWDYGGQFDVWGQGTLVTVSS |
| 1164 | EVQLVQSGAEVKKPGASVKVSCKASGYTFTSYDTHWVRQAPGQGLEWMGRIDPQDGGVKYAQK |
| | FQGRATLTVDTSTSTAYMELSRLRSDDTAVYYCARWDYGGYFDVWGQGTLVTVSS |
| 1165 | EVQLVQSGAEVKKPGASVKVSCKASGYTFTSYDNHWVRQAPGQGLEWMGRIDPQSGGVIYAQK |
| | FQGRATLTVDTSTSTAYMELSRLRSDDTAVYYCARWDYGGYFDVWGQGTLVTVSS |
| 1166 | EVQLVQSGAEVKKPGASVKVSCKASGYTFTQYDIHWVRQAPGQGLEWMGRIDPTSGGIKYAQK |
| | FQGRATLTVDTSTSTAYMELSRLRSDDTAVYYCARWDYGGYFDVWGQGTLVTVSS |
| 1167 | EVQLVQSGAEVKKPGASVKVSCKASGYTFTSYDLHWVRQAPGQGLEWMGRIDPQSGGIRYAQK |
| | FQGRATLTVDTSTSTAYMELSRLRSDDTAVYYCARWDYGGQFDVWGQGTLVTVSS |
| 1168 | EVQLVQSGAEVKKPGASVKVSCKASGYTFTSYDLHWVRQAPGQGLEWMGRIDPPTGGIKYAQK |
| | FQGRATLTVDTSTSTAYMELSRLRSDDTAVYYCARWDYGGYFDVWGQGTLVTVSS |
| 1169 | EVQLVQSGAEVKKPGASVKVSCKASGYTFTEYDMHWVRQAPGQGLEWMGRIDPQSGGIRYAQK |
| | FQGRATLTVDTSTSTAYMELSRLRSDDTAVYYCARWDYGGQFDAWGQGTLVTVSS |
| 1170 | EVQLVQSGAEVKKPGASVKVSCKASGYTFTLYDMHWVRQAPGQGLEWMGRIDPVSGGIKYAQK |
| | FQGRATLTVDTSTSTAYMELSRLRSDDTAVYYCARWDYGGQFDVWGQGTLVTVSS |
| 1171 | EVQLVQSGAEVKKPGASVKVSCKASGYTFTSYDMHWVRQAPGQGLEWMGRIDPQSGGTKYAQK |
| | FQGRATLTVDTSTSTAYMELSRLRSDDTAVYYCARWDYGGQFDVWGQGTLVTVSS |
| 1172 | EVQLVQSGAEVKKPGASVKVSCKASGYTFTSYDMHWVRQAPGQGLEWMGRIDPQSGGIKYAQK |
| | FQGRATLTVDTSTSTAYMELSRLRSDDTAVYYCARWDYGGQFDVWGQGTLVTVSS |
| 1173 | EVQLVQSGAEVKKPGASVKVSCKASGYTFTSYDIHWVRQAPGQGLEWMGRIDPVSGGTKYAQK |
| | FQGRATLTVDTSTSTAYMELSRLRSDDTAVYYCARWDYGGQFDVWGQGTLVTVSS |
| 1174 | EVQLVQSGAEVKKPGASVKVSCKASGYTFTSYDLHWVRQAPGQGLEWMGRIDPQSGGIKYAQK |
| | FQGRATLTVDTSTSTAYMELSRLRSDDTAVYYCARWDYGGQFDVWGQGTLVTVSS |
| 1175 | EVQLVQSGAEVKKPGASVKVSCKASGYTFTSYFLNWVRQAPGQGLEWMGRIDPQIGDSKYAQK |
| | FQGRATLTVDTSTSTAYMELSRLRSDDTAVYYCARWDYGGYFDVWGQGTLVTVSS |
| 1176 | EVQLVQSGAEVKKPGASVKVSCKASGYTFTSYDVHWVRQAPGQGLEWMGRIDPQSGGARYAQK |
| | FQGRATLTVDTSTSTAYMELSRLRSDDTAVYYCARWDYGGQFDVWGQGTLVTVSS |
| 1177 | EVQLVQSGAEVKKPGASVKVSCKASGYTFTSYDMHWVRQAPGQGLEWMGRIDPQSGGIRYAQK |
| | FQGRATLTVDTSTSTAYMELSRLRSDDTAVYYCARWDYGGQFDVWGQGTLVTVSS |
| 1178 | EVQLVQSGAEVKKPGASVKVSCKASGYTFTVYEMQWVRQAPGQGLEWMGRIDPQSGSNHYAQK |
| | FQGRATLTVDTSTSTAYMELSRLRSDDTAVYYCARWDYGGYFDVWGQGTLVTVSS |
| 1179 | EVQLVQSGAEVKKPGASVKVSCKASGYTFTSYYFHWVRQAPGQGLEWMGRIDPQDGDIKYAQK |
| | FQGRATLTVDTSTSTAYMELSRLRSDDTAVYYCARWDYGGYFDVWGQGTLVTVSS |

TABLE 30
20E6 VL variants isolated from TRIM library
after 12 hour off-rate selection

| Seq ID NO. | Amino acid sequence |
|---|---|
| 1180 | DIQMTQSPSSLSASVGDRVTITCRASQDIYNYLNWYQQKPGKAVKLLIYYTSELHSGVPSRF |
| | SGSGSGTDYTLTISSLQPEDFATYFCQQGDVLPWTFGQGTKLEIK |
| 1181 | DIQMTQSPSSLSASVGDRVTITCRASQDIYNYLNWYQQKPGKAVKLLIYYTSILHSGVPSRF |
| | SGSGSGTDYTLTISSLQPEDFATYFCQQGDALPWTFGQGTKLEIK |
| 1182 | DIQMTQSPSSLSASVGDRVTITCRASQDIYNYLNWYQQKPGKAVKLLIYYTSRLHSGVPSRF |
| | SGSGSGTDYTLTISSLQPEDFATYFCQQGDELPWTFGQGTKLEIK |
| 1183 | DIQMTQSPSSLSASVGDRVTITCRASQDIYSYLNWYQQKPGKAVKLLIYYTSNLHSGVPSRF |
| | SGSGSGTDYTLTISSLQPEDFATYFCQQGDTLPWTFGQGTKLEIK |
| 1184 | DIQMTQSPSSLSASVGDRVTITCRASQDIYSYLNWYQQKPGKAVKLLIYYTSILHSGVPSRF |
| | SGSGSGTDYTLTISSLQPEDFATYFCQQGDTLPWTFGQGTKLEIK |
| 1185 | DIQMTQSPSSLSASVGDRVTITCRASQDIYNYLNWYQQKPGKAVKLLIYYTSRLHSGVPSRF |
| | SGSGSGTDYTLTISSLQPEDFATYFCQQGDNLPWTFGQGTKLEIK |
| 1186 | DIQMTQSPSSLSASVGDRVTITCRASQDIYNYLNWYQQKPGKAVKLLIYYTSGLHSGVPSRF |
| | SGSGSGTDYTLTISSLQPEDFATYFCQQGDALPWTFGQGTKLEIK |
| 1187 | DIQMTQSPSSLSASVGDRVTITCRASQDIYNYLNWYQQKPGKAVKLLIYYTSVLHSGVPSRF |
| | SGSGSGTDYTLTISSLQPEDFATYFCQQGDTLPWTFGQGTKLEIK |
| 1188 | DIQMTQSPSSLSASVGDRVTITCRASQDIYHYLNWYQQKPGKAVKLLIYYTSHLHSGVPSRF |
| | SGSGSGTDYTLTISSLQPEDFATYFCQQGDEIPWTFGQGTKLEIK |
| 1189 | DIQMTQSPSSLSASVGDRVTITCRASQDIYNYLNWYQQKPGKAVKLLIYYTSHLHSGVPSRF |
| | SGSGSGTDYTLTISSLQPEDFATYFCQQGDTLPWTFGQGTKLEIK |
| 1190 | DIQMTQSPSSLSASVGDRVTITCRASQDIYNYLNWYQQKPGKAVKLLIYYTSPLHSGVPSRF |
| | SGSGSGTDYTLTISSLQPEDFATYFCQQGDTLPWTFGQGTKLEIK |
| 1191 | DIQMTQSPSSLSASVGDRVTITCRASQDIYKYLNWYQQKPGKAVKLLIYYTSILHSGVPSRF |
| | SGSGSGTDYTLTISSLQPEDFATYFCQQGDELPWTFGQGTKLEIK |
| 1192 | DIQMTQSPSSLSASVGDRVTITCRASQDIYKYLNWYQQKPGKAVKLLIYYTSNLHSGVPSRF |
| | SGSGSGTDYTLTISSLQPEDFATYFCQQGDEIPWTFGQGTKLEIK |
| 1193 | DIQMTQSPSSLSASVGDRVTITCRASQDIWNYLNWYQQKPGKAVKLLIYYTSRLHSGVPSRF |
| | SGSGSGTDYTLTISSLQPEDFATYFCQQGDTLPWTFGQGTKLEIK |
| 1194 | DIQMTQSPSSLSASVGDRVTITCRASQDIFYYLNWYQQKPGKAVKLLIYYTSVLHSGVPSRF |
| | SGSGSGTDYTLTISSLQPEDFATYFCQQGDTLPWTFGQGTKLEIK |
| 1195 | DIQMTQSPSSLSASVGDRVTITCRASQDIYNYLNWYQQKPGKAVKLLIYYTSVLHSGVPSRF |
| | SGSGSGTDYTLTISSLQPEDFATYFCQQGDELPWTFGQGTKLEIK |
| 1196 | DIQMTQSPSSLSASVGDRVTITCRASQDIFNYLNWYQQKPGKAVKLLIYYTSILHSGVPSRF |
| | SGSGSGTDYTLTISSLQPEDFATYFCQQGDTLPWTFGQGTKLEIK |
| 1197 | DIQMTQSPSSLSASVGDRVTITCRASQDIWKYLNWYQQKPGKAVKLLIYYTSILHSGVPSRF |
| | SGSGSGTDYTLTISSLQPEDFATYFCQQGDTIPWTFGQGTKLEIK |
| 1198 | DIQMTQSPSSLSASVGDRVTITCRASQDIFNYLNWYQQKPGKAVKLLIYYTSHLHSGVPSRF |
| | SGSGSGTDYTLTISSLQPEDFATYFCQQGDTLPWTFGQGTKLEIK |
| 1199 | DIQMTQSPSSLSASVGDRVTITCRASQDIWNYLNWYQQKPGKAVKLLIYYTSTLHSGVPSRF |
| | SGSGSGTDYTLTISSLQPEDFATYFCQQGDLLPWTFGQGTKLEIK |
| 1200 | DIQMTQSPSSLSASVGDRVTITCRASQDIFNYLNWYQQKPGKAVKLLIYYTSYLHSGVPSRF |
| | SGSGSGTDYTLTISSLQPEDFATYFCQQGDTLPWTFGQGTKLEIK |
| 1201 | DIQMTQSPSSLSASVGDRVTITCRASQDIYSYLNWYQQKPGKAVKLLIYYTSRLHSGVPSRF |
| | SGSGSGTDYTLTISSLQPEDFATYFCQQGDTLPWTFGQGTKLEIK |
| 1202 | DIQMTQSPSSLSASVGDRVTITCRASQDIYNYLNWYQQKPGKAVKLLIYYTSILHSGVPSRF |
| | SGSGSGTDYTLTISSLQPEDFATYFCQQGDELPWTFGQGTKLEIK |
| 1203 | DIQMTQSPSSLSASVGDRVTITCRASQDIYNYLNWYQQKPGKAVKLLIYYTSELHSGVPSRF |
| | SGSGSGTDYTLTISSLQPEDFATYFCQQGDTLPWTFGQGTKLEIK |
| 1204 | DIQMTQSPSSLSASVGDRVTITCRASQDIYNYLNWYQQKPGKAVKLLIYYTSRLHSGVPSRF |
| | SGSGSGTDYTLTISSLQPEDFATYFCQQGDTLPWTFGQGTKLEIK |
| 1205 | DIQMTQSPSSLSASVGDRVTITCRASQDIYNYLNWYQQKPGKAVKLLIYYTSILHSGVPSRF |
| | SGSGSGTDYTLTISSLQPEDFATYFCQQGDTLPWTFGQGTKLEIK |
| 1206 | DIQMTQSPSSLSASVGDRVTITCRASQDIYNYLNWYQQKPGKAVKLLIYYTSGLHSGVPSRF |
| | SGSGSGTDYTLTISSLQPEDFATYFCQQGDTLPWTFGQGTKLEIK |
| 1207 | DIQMTQSPSSLSASVGDRVTITCRASQDIYNYLNWYQQKPGKAVKLLIYYTSHLHSGVPSRF |
| | SGSGSGTDYTLTISSLQPEDFATYFCQQGDALPWTFGQGTKLEIK |
| 1208 | DIQMTQSPSSLSASVGDRVTITCRASQDIYNYLNWYQQKPGKAVKLLIYYTSALHSGVPSRE |
| | SGSGSGTDYTLTISSLQPEDFATYFCQQGDTLPWTFGQGTKLEIK |
| 1209 | DIQMTQSPSSLSASVGDRVTITCRASQDIYNYLNWYQQKPGKAVKLLIYYTSNLHSGVPSRF |
| | SGSGSGTDYTLTISSLQPEDFATYFCQQGDTLPWTFGQGTKLEIK |
| 1210 | DIQMTQSPSSLSASVGDRVTITCRASQDIYNYLNWYQQKPGKAVKLLIYYESRLHSGVPSRE |
| | SGSGSGTDYTLTISSLQPEDFATYFCQQGDELPWTFGQGTKLEIK |
| 1211 | DIQMTQSPSSLSASVGDRVTITCRASQDIYNYLNWYQQKPGKAVKLLIYYTSNLHSGVPSRF |
| | SGSGSGTDYTLTISSLQPEDFATYFCQQGDTMPWTFGQGTKLEIK |

TABLE 31
Consensus of 20E6 variants isolated from Doping Library after 2 hour off-rate
selection, P1 population

| Seq ID NO. | Identifier | Amino acid sequence |
|---|---|---|
| 1212 | VH consensus | EVQLVQSGAEVKKPGASVKVSCKASGYTFTSYYMQWVRQAP |
| | | GQGLEWMGRIDPQSGGIKYAQKFQGRATLTVDTSTSTAYME |
| | | LSRLRSDDTAVYYCARWDYGGYFDVWGQGTLVTVSS |
| 1213 | HCDR1_consensus | SYYMQ |
| | | R WIN |
| | | N LLH |
| | | T D S |
| | | F A |
| 1214 | HCDR2_consensus | RIDPQSGGIKYAQKFQG |
| | | ED DVR |
| | | LR SI |
| | | WN FL |
| | | DI |
| | | G |
| 1215 | HCDR3_consensus | WDYGGYFDV |
| | | W Q |
| 1216 | VL consensus | DIQMTQSPSSLSASVGDRVTITCRASQDIWNYLNWYQQKPG |
| | | KAVKLLIYYTSRLETGVPSRFSGSGSGTDYTLTISSLQPED |
| | | FATYFCQQGDTLPWTFGQGTKLEIK |
| 1217 | LCDR1_consensus | RASQDIWNYLN |
| | | YS |
| | | H |
| | | Y |
| 1218 | LCDR2_consensus | YTSRLET |
| | | S G HS |
| | | M |
| | | V |
| | | S |
| | | L |
| | | W |
| | | I |
| 1219 | LCDR3_consensus | QQGDTLPWT |
| | | AI |
| | | I |
| | | M |

Please note that for the consensus sequences in Table 31 and subsequent tables
that the blank spots below an amino acid residue indicate that the amino acid
residue at that position does not change and is not substituted. In Table 31
and subsequent tables if there is any amino acid below an amino acid residue
then that amino acid residue at that position may be substituted with the
any amino acid listed. For example, for HCDR1 of SEQ ID NO: 1213, the serine
(S) at position 1 may be substituted with any of arginine (R), asparagine (N),
or threonine (T). For SEQ ID NO: 1213, the tyrosine (Y) at position 2 is not
substituted, however the tyrosine (Y) at position 3 may be substituted with
any of tryptophan (W), leucine (L), aspartic acid (D), or phenylalanine (F).
For SEQ ID NO: 1213, the methionine (M) at position 4 may be substituted with
any of: isoleucine (I) or leucine (L). For SEQ ID NO: 1213, the glutamine (Q)
at position 5 may be substituted with any of: asparagine (N), histidine
(H), serine (S), or alanine (A). See below for a representation (with
subcolumns shown) of the description in this paragraph.

| | | |
|---|---|---|
| 1213 | HCDR1_consensus | S Y Y M Q |
| | | R W I N |
| | | N L L H |
| | | T D S |
| | | F A |

TABLE 32
Consensus of 20E6 variants isolated from Doping Library after 2 hour
off-rate selection, P2 population

| Seq ID NO. | Identifier | Amino acid sequence |
|---|---|---|
| 1220 | VH consensus | EVQLVQSGAEVKKPGASVKVSCKASGYTFTSYDMQWVRQAP |
| | | GQGLEWMGRIDPQSGGIKYAQKFQGRATLTVDTSTSTAYME |
| | | LSRLRSDDTAVYYCARWDYGGYFDVWGQGTLVTVSS |
| 1221 | HCDR1_consensus | SYDMQ |
| | | R FIH |
| | | A LLN |
| | | WVY |
| | | Y |
| 1222 | HCDR2_consensus | RIDPQSGGIKYAQKFQG |
| | | ED DVI |
| | | PG TL |
| | | D S |
| | | K |
| 1223 | HCDR3_consensus | WDYGGYFDV |
| | | Y F |
| 1224 | VL consensus | DIQMTQSPSSLSASVGDRVTITCRASQDIYNYLNWYQQKPG |
| | | KAVKLLIYYTSRLETGVPSRFSGSGSGTDYTLTISSLQPED |
| | | FATYFCQQGDTLPWTFGQGTKLEIK |
| 1225 | LCDR1_consensus | RASQDIYNYLN |
| | | FH |
| | | AS |
| | | S |
| 1226 | LCDR2_consensus | YTSRLET |
| | | M HS |
| | | G |
| | | I |
| | | S |
| | | E |
| 1227 | LCDR3_consensus | QQGDTLPWT |
| | | EAI |
| | | I |
| | | S |
| | | E |

TABLE 33
Consensus of 20E6 variants isolated from Doping Library after 2 hour
off-rate selection, P3 population

| Seq ID NO. | Identifier | Amino acid sequence |
|---|---|---|
| 1228 | VH consensus | EVQLVQSGAEVKKPGASVKVSCKASGYTFTSYLMQWVRQAP |
| | | GQGLEWMGRIDPQSGGIKYAQKFQGRATLTVDTSTSTAYME |
| | | LSRLRSDDTAVYYCARWDYGGYFDVWGQGTLVTVSS |
| 1229 | HCDR1_ onsensus | SYLMQ |
| | | R WLH |
| | | N DIN |
| | | VS |
| | | T |
| | | C |
| 1230 | HCDR2_consensus | RIDPQSGGIKYAQKFQG |
| | | EN DVI |
| | | RG SR |
| | | L TN |
| | | P N |
| | | D F |
| 1231 | HCDR3_ onsensus | WDYGGYFDV |
| | | NW F |
| | | F |
| | | H |
| 1232 | VL consensus | DIQMTQSPSSLSASVGDRVTITCRASQDIYNYLNWYQQKPG |
| | | KAVKLLIYYTSRLETGVPSRFSGSGSGTDYTLTISSLQPED |
| | | FATYFCQQGDTLPWTFGQGTKLEIK |
| 1233 | LCDR1_consensus | RASQDIYNYLN |
| | | FS |
| | | TY |
| | | A |
| | | S |
| 1234 | LCDR2_consensus | YTSRLET |
| | | S M HS |
| | | A G |
| | | S |
| | | E |
| 1235 | LCDR3_consensus | QQGDTLPWT |
| | | SV |
| | | A |
| | | I |

TABLE 34
Consensus of 20E6 variants isolated from Doping Library after 2 hour
off-rate selection, P4 population

| Seq ID NO. | Identifier | Amino acid sequence |
|---|---|---|
| 1236 | VH consensus | EVQLVQSGAEVKKPGASVKVSCKASGYTFTSYLMHWVRQAP |
| | | GQGLEWMGRIDPQSGGIKYAQKFQGRATLTVDTSTSTAYME |
| | | LSRLRSDDTAVYYCARWDYGGYFDVWGQGTLVTVSS |
| 1237 | HCDR1_consensus | SYLMH |
| | | R WLQ |
| | | T YVN |
| | | DTA |
| | | I |
| 1238 | HCDR2_consensus | RIDPQSGGIKYAQKFQG |
| | | LEG VSR |
| | | PT EVI |
| | | VN NT |
| | | R MM |
| | | M F |
| | | L |
| | | H |
| | | D |
| 1239 | HCDR3_consensus | WDYGGYFDV |
| | | W |
| | | H |
| 1240 | VL consensus | DIQMTQSPSSLSASVGDRVTITCRASQDITNYLNWYQQKPG |
| | | KAVKLLIYYTSRLETGVPSRFSGSGSGTDYTLTISSLQPED |
| | | FATYFCQQGDTLPWTFGQGTKLEIK |
| 1241 | LCDR1_consensus | RASQDITNYLN |
| | | YH |
| | | AK |
| 1242 | LCDR2_consensus | YTSRLET |
| | | S G HS |
| | | M |
| | | S |
| | | I |
| 1243 | LCDR3_consensus | QQGDTLPWT |
| | | I |
| | | A |

TABLE 35
Consensus of 20E6 variants isolated from Doping Library after 12 hour
off-rate selection

| Seq ID NO. | Identifier | Amino acid sequence |
|---|---|---|
| 1244 | VH consensus | EVQLVQSGAEVKKPGASVKVSCKASGYTFTSYYMNWVRQAP |
| | | GQGLEWMGRIDPQSGGIKYAQKFQGRATLTVDTSTSTAYME |
| | | LSRLRSDDTAVYYCARWDYGGYFDVWGQGTLVTVSS |
| 1245 | HCDR1_consensus | SYYMN |
| | | R LLQ |
| | | T WIH |
| | | G DVS |
| | | FT |
| 1246 | HCDR2_consensus | RIDPQSGGIKYAQKFQG |
| | | ED DVR |
| | | LI ETI |
| | | HN S |
| | | G N |
| | | L |
| 1247 | HCDR3_consensus | WDYGGYFDV |
| 1248 | VL consensus | DIQMTQSPSSLSASVGDRVTITCRASQDIWNYLNWYQQKPG |
| | | KAVKLLIYYTSMLETGVPSRFSGSGSGTDYTLTISSLQPED |
| | | FATYFCQQGDTLPWTFGQGTKLEIK |
| 1249 | LCDR1_consensus | RASQDIWNYLN |
| | | H |
| | | K |
| 1250 | LCDR2_consensus | YTSMLET |
| | | G HS |
| | | I |
| | | R |
| | | V |
| 1251 | LCDR3_consensus | QQGDTLPWT |
| | | S |
| | | N |
| | | A |
| | | M |
| | | I |

TABLE 36
Consensus of 20E6 variants isolated from TRIM library after 2 hour
off-rate selection, P1 population

| Seq ID NO. | Identifier | Amino acid sequence |
|---|---|---|
| 1252 | VH consensus | EVQLVQSGAEVKKPGASVKVSCKASGYTFTSYDMHWVRQAP |
| | | GQGLEWMGRIDPQSGGIKYAQKFQGRATLTVDTSTSTAYME |
| | | LSRLRSDDTAVYYCARWDYGGYFDVWGQGTLVTVSS |
| 1253 | HCDR1_consensus | SYDMH |
| | | R WLQ |
| | | Y Y |
| | | N |
| | | K |
| 1254 | HCDR2_consensus | RIDPQSGGIKYAQKFQG |
| | | DD DVR |
| | | FT T |
| | | N S |
| | | F |
| 1255 | HCDR3_consensus | WDYGGYFDV |
| | | Y F Q |
| 1256 | VL consensus | DIQMTQSPSSLSASVGDRVTITCRASQDIYNYLNWYQQKPG |
| | | KAVKLLIYYTSVLHSGVPSRESGSGSGTDYTLTISSLQPED |
| | | FATYFCQQGDTLPWTFGQGTKLEIK |
| 1257 | LCDR1_consensus | RASQDIYNYLN |
| | | K FK |
| 1258 | LCDR2_consensus | YTSVLHS |
| | | I |
| | | L |
| | | G |
| | | H |
| | | Y |
| | | N |
| 1259 | LCDR3_consensus | QQGDTLPWT |
| | | E |
| | | A |
| | | L |

TABLE 37
Consensus of 20E6 variants isolated from TRIM library after 2 hour
off-rate selection, P2 population

| Seq ID NO. | Identifier | Amino acid sequence |
|---|---|---|
| 1260 | VH consensus | EVQLVQSGAEVKKPGASVKVSCKASGYTFTSYDMHWVRQAP |
| | | GQGLEWMGRIDPQSGGIKYAQKFQGRATLTVDTSTSTAYME |
| | | LSRLRSDDTAVYYCARWDYGGYFDVWGQGTLVTVSS |
| 1261 | HCDR1_consensus | SYDMH |
| | | Y LN |
| | | R |
| | | Q |
| | | N |
| 1262 | HCDR2_consensus | RIDPQSGGIKYAQKFQG |
| | | D DVR |
| | | T T |
| | | V Q |
| 1263 | HCDR3_consensus | WDYGGYFDV |
| | | Y Q |
| | | F |
| 1264 | VL consensus | DIQMTQSPSSLSASVGDRVTITCRASQDIYNYLNWYQQKPG |
| | | KAVKLLIYYTSRLHSGVPSRFSGSGSGTDYTLTISSLQPED |
| | | FATYFCQQGDTLPWTFGQGTKLEIK |
| 1265 | LCDR1_consensus | RASQDIYNYLN |
| | | FK |
| 1266 | LCDR2_consensus | YTSRLHS |
| | | G |
| | | I |
| | | V |
| | | L |
| | | S |
| | | E |
| 1267 | LCDR3_consensus | QQGDTLPWT |
| | | EI |
| | | G |
| | | D |
| | | A |

TABLE 38
Consensus of 20E6 variants isolated from TRIM library after 2 hour
off-rate selection, P3 population

| Seq ID NO. | Identifier | Amino acid sequence |
|---|---|---|
| 1268 | VH consensus | EVQLVQSGAEVKKPGASVKVSCKASGYTFTSYDMHWVRQAP |
| | | GQGLEWMGRIDPQSGGIKYAQKFQGRATLTVDTSTSTAYME |
| | | LSRLRSDDTAVYYCARWDYGGYFDVWGQGTLVTVSS |
| 1269 | HCDR1_consensus | SYDMH |
| | | F WIS |
| | | L |
| | | V |
| 1270 | HCDR2_consensus | RIDPQSGGIKYAQKFQG |
| | | N DTV |
| | | T DR |
| | | G S |
| 1271 | HCDR3_consensus | WDYGGYFDV |
| | | YEHA |
| | | Q |
| 1272 | VL consensus | DIQMTQSPSSLSASVGDRVTITCRASQDIYNYLNWYQQKPG |
| | | KAVKLLIYYTSRLHSGVPSRFSGSGSGTDYTLTISSLQPED |
| | | FATYFCQQGDTLPWTFGQGTKLEIK |
| 1273 | LCDR1_consensus | RASQDIYNYLN |
| | | G TY |
| | | F |
| 1274 | LCDR2_consensus | YTSRLHS |
| | | V |
| | | N |
| | | Y |
| | | I |
| | | H |
| | | A |
| 1275 | LCDR3_consensus | QQGDTLPWT |

TABLE 39
Consensus of 20E6 variants isolated from TRIM library after 2 hour
off-rate selection, P4 population

| Seq ID NO. | Identifier | Amino acid sequence |
|---|---|---|
| 1276 | VH consensus | EVQLVQSGAEVKKPGASVKVSCKASGYTFTSYDMHWVRQAP |
| | | GQGLEWMGRIDPQSGGIKYAQKFQGRATLTVDTSTSTAYME |
| | | LSRLRSDDTAVYYCARWDYGGYFDVWGQGTLVTVSS |
| 1277 | HCDR1_consensus | SYDMH |
| | | D WLQ |
| | | T QVV |
| | | R EIS |
| | | P F |
| | | N |
| | | H |
| | | G |
| | | A |
| 1278 | HCDR2_consensus | RIDPQSGGIKYAQKFQG |
| | | W YG SYR |
| | | VR DVI |
| | | K NHP |
| | | I LD |
| | | D DA |
| 1279 | HCDR3_consensus | WDYGGYFDV |
| | | Y HS N |
| | | QA L |
| | | E F |
| 1280 | VL consensus | DIQMTQSPSSLSASVGDRVTITCRASQDIYNYLNWYQQKPG |
| | | KAVKLLIYYTSRLHSGVPSRFSGSGSGTDYTLTISSLQPED |
| | | FATYFCQQGDTLPWTFGQGTKLEIK |
| 1281 | LCDR1_consensus | RASQDIYNYLN |
| | | TS |
| | | FY |
| | | H |
| | | K |
| 1282 | LCDR2_consensus | YTSRLHS |
| | | N |
| | | Q |
| | | I |
| | | E |
| | | A |
| 1283 | LCDR3_consensus | QQGDTLPWT |
| | | Q |
| | | V |

TABLE 40
Consensus of 20E6 variants isolated from TRIM library after 12 hour
off-rate selection

| Seq ID NO. | Identifiter | Amino acid sequence |
|---|---|---|
| 1284 | VH consensus | EVQLVQSGAEVKKPGASVKVSCKASGYTFTSYDMHWVRQAP |
| | | GQGLEWMGRIDPQSGGIKYAQKFQGRATLTVDTSTSTAYME |
| | | LSRLRSDDTAVYYCARWDYGGYFDVWGQGTLVTVSS |
| 1285 | HCDR1_consensus | SYDMH |
| | | H YLN |
| | | Y LIQ |
| | | Q |
| 1286 | HCDR2_consensus | RIDPQSGGIKYAQKFQG |
| | | DD DTR |
| | | VT SV |
| | | IG S |
| | | Y |
| | | P |
| 1287 | HCDR3_consensus | WDYGGYFDV |
| | | HT Q |
| | | H |
| 1288 | VL consensus | DIQMTQSPSSLSASVGDRVTITCRASQDIYNYLNWYQQKPG |
| | | KAVKLLIYYTSILHSGVPSRFSGSGSGTDYTLTISSLQPED |
| | | FATYFCQQGDTLPWTFGQGTKLEIK |
| 1289 | LCDR1_consensus | RASQDIYNYLN |
| | | FS |
| | | WK |
| 1290 | LCDR2_consensus | YTSILHS |
| | | R |
| | | H |
| | | V |
| | | G |
| | | N |
| | | E |
| 1291 | LCDR3_consensus | QQGDTLPWT |
| | | EI |
| | | A |

[0808] Sequence logos were next prepared to better visualize the frequency distribution of CDR residue changes in 20E6 variants from the various sorting conditions for doping (FIG. 6 and FIG. 7) and TRIM (FIG. 8 and FIG. 9) library selection outputs. While the distributions of different amino acids at each CDR residue appear to be similar across the different selection conditions within the same library, there are surprising differences between the doping and TRIM libraries outputs. For example, in the VH the prevalent S3IR change only appeared in the doping library outputs; the W-33 D change is more dominant in the TRIM library outputs; and the Y100Q change is prominent only in the TRIM library after 12 hours of off-rate selection. In the VL, the dominant T30Y change in the TRIM and doping library outputs P2 to P4 was replaced by T30W change with greater off-rate selection pressure in the doping library P1 outputs at 2 and 12 hours. Lastly, the VL CDR2 H55/S56 to E55/T56 human germline changes appeared to be preferred in the doping library output upon off-rate selection pressure. These changes were missing in the TRIM library output as they were not built in the TRIM library. The E55/T56 germline changes were incorporated into the TRIM library output sequences.

### Example 10: Analysis of Affinity Matured 20E6 Variant Sequences from all Doping and TRIM Library Selection Outputs

[0809] To provide a complete overview of CDR residues that contribute to improved affinity to LAP-TGFb1, the investigators aligned all available 432 VH and 457 VL sequences from all selection outputs from both the doping and TRIM libraries. The sequence logos shown in FIG. 10 highlight the amino acid compositions at each position and their relative representations. Table 41 summarizes the consensus sequences of 20E6 variants from all outputs as well as amino acids that are represented at more than 1% of the available sequences in the order of abundance at each CDR residue positions. It is expected that each identified amino acid change in the 20E6 CDRs alone or in combinations will contribute to improved affinity to human LAP-TGFb1.

TABLE 41
Consensus of 20E6 variants isolated from both TRIM and doping libraries
after all selection conditions

| Seq ID | Identifier | Amino acid sequence |
|---|---|---|
| 2217 | VH consensus | EVQLVQSGAEVKKPGASVKVSCKASGYTFTSYDMHWVRQAP |
| | | GQGLEWMGRIDPQSGGIKYAQKFQGRATLTVDTSTSTAYME |
| | | LSRLRSDDTAVYYCARWDYGGYFDVWGQGTLVTVSS |
| 2218 | HCDR1_consensus | SYDMH |
| | | R LLQ |
| | | N WIN |
| | | Y YVS |
| | | T FTA |
| | | Q T |
| | | K |
| | | H |
| | | G |
| | | A |
| 2219 | HCDR2_consensus | RIDPQSGGIKYAQKFQG |
| | | ED DVR |
| | | DG SSI |
| | | LT ETL |
| | | PN F |
| | | VI N |
| | | YR G |
| | | I D |
| | | H M |
| | | R |
| 2220 | HCDR3_consensus | WDYGGYFDV |
| | | YHH Q |
| | | W F |
| | | F |
| 2221 | VL consensus | DIQMTQSPSSLSASVGDRVTITCRASQDIYNYLNWYQQKPG |
| | | KAVKLLIYYTSRLHSGVPSRFSGSGSGTDYTLTISSLQPED |
| | | FATYFCQQGDTLPWTFGQGTKLEIK |
| 2222 | LCDR1_consensus | RASQDIYNYLN |
| | | WH |
| | | FS |
| | | TK |
| | | AY |
| | | S |
| 2223 | LCDR2_consensus | YTSRLHS |
| | | S G ET |
| | | I |
| | | M |
| | | V |
| | | S |
| | | N |
| | | L |
| | | H |
| | | E |
| | | Y |
| | | Q |
| | | K |
| | | A |
| 2224 | LCDR3_consensus | QQGDTLPWT |
| | | EI |
| | | AV |
| | | IQ |
| | | S |
| | | M |
| | | L |
| | | G |
| | | N |
| | | D |

### Example 11: Next Generation Sequencing (NGS) Analysis of 20E6 Variants from Yeast Selection Outputs

[0810] To more comprehensively understand the CDR residue changes that are selected from the different sorting gates for better binding to LAP-TGFb1 protein by yeast display, the investigators isolated 20E6 variant sequences from each of the output and subjected them to next generation sequences. Without being limited, it is believed that the sequences derived from the NGS analysis provide additional information on critical residues at each CDR position that contributed to improved LAP-TGFb1 binding individually or in combination. The increased available sequences allowed the selection of 20E6 variants that have the most optimal binding to LAP-TGFb1 while minimizing impact on potentially increased immunogenicity or developability.

### Example 12: Expression of 20E6 Variants from Different Off-Rate Selection Pressure as Fab Proteins for Binding Analysis

[0811] Twenty-seven affinity matured 20E6 variants from the five TRIM library outputs were converted to soluble Fab proteins for recombinant expression by CHO cells for binding analysis. The sequences are listed in Table 42 and Table 43.

TABLE 42
20E6 variants isolated from yeast display selection

| Seq | | |
|---|---|---|
| ID | | |
| NO. | Identifier | Amino acid sequence |
| 1292 | VH W33D M34I | SYDIH |
| | (55BJN)_HCDR1 | |
| 1293 | VH W33D M34I | RIDPQSGGIKYAQKFQG |
| | (55BJN)_HCDR2 | |
| 1294 | VH W33D M34I | WDYGGYFDV |
| | (55BJN)_HCDR3 | |
| 1295 | VH W33D M34I | EVOLVQSGAEVKKPGASVKVSCKASGYTFTSYDIHWVRQA |
| | (55BJN)_VH | PGOGLEWMGRIDPQSGGIKYAQKFQGRATLTVDTSTSTAY |
| | | MELSRLRSDDTAVYYCARWDYGGYFDVWGQGTLVTVSS |
| 1296 | VH W33D M34I | EVQLVQSGAEVKKPGASVKVSCKASGYTFTSYDIHWVRQA |
| | (55BJN)_Fab_HC | PGQGLEWMGRIDPQSGGIKYAQKFQGRATLTVDTSTSTAY |
| | | MELSRLRSDDTAVYYCARWDYGGYFDVWGQGTLVTVSSAS |
| | | TKGPSVFPLAPSSKSTSGGTAALGCLVKDYFPEPVTVSWN |
| | | SGALTSGVHTFPAVLQSSGLYSLSSVVTVPSSSLGTQTYI |
| | | CNVNHKPSNTKVDKKVEPKSCDKTHT |
| 1297 | VL (55BJN)_LCDR1 | RASQDITNYLN |
| 1298 | VL (55BJN)_LCDR2 | YTSRLHS |
| 1299 | VL (55BJN)_LCDR3 | QQGDTLPWT |
| 1300 | VL (55BJN)_VL | DIQMTQSPSSLSASVGDRVTITCRASQDITNYLNWYQQKP |
| | | GKAVKLLIYYTSRLHSGVPSRESGSGSGTDYTLTISSLQP |
| | | EDFATYFCQQGDTLPWTFGQGTKLEIK |
| 1301 | VL (55BJN)_LC | DIQMTQSPSSLSASVGDRVTITCRASQDITNYLNWYQQKP |
| | | GKAVKLLIYYTSRLHSGVPSRESGSGSGTDYTLTISSLQP |
| | | EDFATYFCQQGDTLPWTFGQGTKLEIKRTVAAPSVFIFPP |
| | | SDEQLKSGTASVVCLLNNFYPREAKVQWKVDNALQSGNSQ |
| | | ESVTEQDSKDSTYSLSSTLTLSKADYEKHKVYACEVTHQG |
| | | LSSPVTKSENRGEC |
| 1302 | VH W33D M34I Q54Y | SYDIH |
| | (56BJN)_HCDR1 | |
| 1303 | VH W33D M34I Q54Y | RIDPYSGGIKYAQKFQG |
| | (56BJN)_HCDR2 | |
| 1304 | VH W33D M34I Q54Y | WDYGGYFDV |
| | (56BJN)_HCDR3 | |
| 1305 | VH W33D M34I Q54Y | EVQLVQSGAEVKKPGASVKVSCKASGYTFTSYDIHWVRQA |
| | (56BJN)_VH | PGQGLEWMGRIDPYSGGIKYAQKFQGRATLTVDTSTSTAY |
| | | MELSRLRSDDTAVYYCARWDYGGYFDVWGQGTLVTVSS |
| 1306 | VH W33D M34I Q54Y | EVQLVQSGAEVKKPGASVKVSCKASGYTFTSYDIHWVRQA |
| | (56BJN)_Fab_HC | PGQGLEWMGRIDPYSGGIKYAQKFQGRATLTVDTSTSTAY |
| | | MELSRLRSDDTAVYYCARWDYGGYFDVWGQGTLVTVSSAS |
| | | TKGPSVFPLAPSSKSTSGGTAALGCLVKDYFPEPVTVSWN |
| | | SGALTSGVHTFPAVLQSSGLYSLSSVVTVPSSSLGTQTYI |
| | | CNVNHKPSNTKVDKKVEPKSCDKTHT |
| 1307 | VL (56BJN)_LCDR1 | RASQDITNYLN |
| 1308 | VL (56BJN)_LCDR2 | YTSRLHS |
| 1309 | VL (56BJN)_LCDR3 | QQGDTLPWT |
| 1310 | VL (56BJN)_VL | DIQMTQSPSSLSASVGDRVTITCRASQDITNYLNWYQQKP |
| | | GKAVKLLIYYTSRLHSGVPSRESGSGSGTDYTLTISSLQP |
| | | EDFATYFCQQGDTLPWTFGQGTKLEIK |
| 1311 | VL (56BJN)_LC | DIQMTQSPSSLSASVGDRVTITCRASQDITNYLNWYQQKP |
| | | GKAVKLLIYYTSRLHSGVPSRESGSGSGTDYTLTISSLQP |
| | | EDFATYFCQQGDTLPWTFGQGTKLEIKRTVAAPSVFIFPP |
| | | SDEQLKSGTASVVCLLNNFYPREAKVQWKVDNALQSGNSQ |
| | | ESVTEQDSKDSTYSLSSTLTLSKADYEKHKVYACEVTHQG |
| | | LSSPVTKSENRGEC |
| 1312 | VH W33D | SYDMH |
| | (57BJN)_HCDR1 | |
| 1313 | VH W33D | RIDPQSGGIKYAQKFQG |
| | (57BJN)_HCDR2 | |
| 1314 | VH W33D | WDYGGYFDV |
| | (57BJN)_HCDR3 | |
| 1315 | VH W33D (57BJN)_VH | EVOLVQSGAEVKKPGASVKVSCKASGYTFTSYDMHWVRQA |
| | | PGQGLEWMGRIDPQSGGIKYAQKFQGRATLTVDTSTSTAY |
| | | MELSRLRSDDTAVYYCARWDYGGYFDVWGQGTLVTVSS |
| 1316 | VH W33D | EVQLVQSGAEVKKPGASVKVSCKASGYTFTSYDMHWVRQA |
| | (57BJN)_Fab_HC | PGQGLEWMGRIDPQSGGIKYAQKFQGRATLTVDTSTSTAY |
| | | MELSRLRSDDTAVYYCARWDYGGYFDVWGQGTLVTVSSAS |
| | | TKGPSVFPLAPSSKSTSGGTAALGCLVKDYFPEPVTVSWN |
| | | SGALTSGVHTFPAVLQSSGLYSLSSVVTVPSSSLGTQTYI |
| | | CNVNHKPSNTKVDKKVEPKSCDKTHT |
| 1317 | VL (57BJN)_LCDR1 | RASQDITNYLN |
| 1318 | VL (57BJN)_LCDR2 | YTSRLHS |
| 1319 | VL (57BJN)_LCDR3 | QQGDTLPWT |
| 1320 | VL (57BJN)_VL | DIQMTQSPSSLSASVGDRVTITCRASQDITNYLNWYQQKP |
| | | GKAVKLLIYYTSRLHSGVPSRFSGSGSGTDYTLTISSLQP |
| | | EDFATYFCQQGDTLPWTFGQGTKLEIK |
| 1321 | VL (57BJN)_LC | DIQMTQSPSSLSASVGDRVTITCRASQDITNYLNWYQQKP |
| | | GKAVKLLIYYTSRLHSGVPSRFSGSGSGTDYTLTISSLQP |
| | | EDFATYFCQQGDTLPWTFGQGTKLEIKRTVAAPSVFIFPP |
| | | SDEQLKSGTASVVCLLNNFYPREAKVQWKVDNALQSGNSQ |
| | | ESVTEQDSKDSTYSLSSTLTLSKADYEKHKVYACEVTHQG |
| | | LSSPVTKSENRGEC |
| 1322 | VH W33D W99Y Y101H | SYDMH |
| | (58BJN)_HCDR1 | |
| 1323 | VH W33D W99Y Y101H | RIDPQSGGIKYAQKFQG |
| | (58BJN)_HCDR2 | |
| 1324 | VH W33D W99Y Y101H | YDHGGYFDV |
| | (58BJN)_HCDR3 | |
| 1325 | VH W33D W99Y Y101H | EVQLVQSGAEVKKPGASVKVSCKASGYTFTSYDMHWVRQA |
| | (58BJN)_VH | PGQGLEWMGRIDPQSGGIKYAQKFQGRATLTVDTSTSTAY |
| | | MELSRLRSDDTAVYYCARYDHGGYFDVWGQGTLVTVSS |
| 1326 | VH W33D W99Y Y101H | EVQLVQSGAEVKKPGASVKVSCKASGYTFTSYDMHWVRQA |
| | (58BJN)_Fab_HC | PGQGLEWMGRIDPQSGGIKYAQKFQGRATLTVDTSTSTAY |
| | | MELSRLRSDDTAVYYCARYDHGGYFDVWGQGTLVTVSSAS |
| | | TKGPSVFPLAPSSKSTSGGTAALGCLVKDYFPEPVTVSWN |
| | | SGALTSGVHTFPAVLQSSGLYSLSSVVTVPSSSLGTQTYI |
| | | CNVNHKPSNTKVDKKVEPKSCDKTHT |
| 1327 | VL T30Y | RASQDIYNYLN |
| | (58BJN)_LCDR1 | |
| 1328 | VL T30Y | YTSRLHS |
| | (58BJN)_LCDR2 | |
| 1329 | VL T30Y | QQGDTLPWT |
| | (58BJN)_LCDR3 | |
| 1330 | VL T30Y (58BJN)_VL | DIQMTQSPSSLSASVGDRVTITCRASQDIYNYLNWYQQKP |
| | | GKAVKLLIYYTSRLHSGVPSRFSGSGSGTDYTLTISSLQP |
| | | EDFATYFCQQGDTLPWTFGQGTKLEIK |
| 1331 | VL T30Y (58BJN)_LC | DIQMTQSPSSLSASVGDRVTITCRASQDIYNYLNWYQQKP |
| | | GKAVKLLIYYTSRLHSGVPSRFSGSGSGTDYTLTISSLQP |
| | | EDFATYFCQQGDTLPWTFGQGTKLEIKRTVAAPSVFIFPP |
| | | SDEQLKSGTASVVCLLNNFYPREAKVQWKVDNALQSGNSQ |
| | | ESVTEQDSKDSTYSLSSTLTLSKADYEKHKVYACEVTHQG |
| | | LSSPVTKSENRGEC |
| 1332 | VH W33Q M34V | SYQVH |
| | (59BJN)_HCDR1 | |
| 1333 | VH W33Q M34V | RIDPQSGGIKYAQKFQG |
| | (59BJN)_HCDR2 | |
| 1334 | VH W33Q M34V | DYGGYFDV |
| | (59BJN)_HCDR3 | |
| 1335 | VH W33Q M34V | EVQLVQSGAEVKKPGASVKVSCKASGYTFTSYQVHWVRQA |
| | (59BJN)_VH | PGQGLEWMGRIDPQSGGIKYAQKFQGRATLTVDTSTSTAY |
| | | MELSRLRSDDTAVYYCARWDYGGYFDVWGQGTLVTVSS |
| 1336 | VH W33Q M34V | EVOLVQSGAEVKKPGASVKVSCKASGYTFTSYQVHWVRQA |
| | (59BJN)_Fab_HC | PGQGLEWMGRIDPQSGGIKYAQKFQGRATLTVDTSTSTAY |
| | | MELSRLRSDDTAVYYCARWDYGGYFDVWGQGTLVTVSSAS |
| | | TKGPSVFPLAPSSKSTSGGTAALGCLVKDYFPEPVTVSWN |
| | | SGALTSGVHTFPAVLQSSGLYSLSSVVTVPSSSLGTQTYI |
| | | CNVNHKPSNTKVDKKVEPKSCDKTHT |
| 1337 | VL T30Y | RASQDIYNYLN |
| | (59BJN)_LCDR1 | |
| 1338 | VL T30Y | YTSRLHS |
| | (59BJN)_LCDR2 | |
| 1339 | VL T30Y | QQGDTLPWT |
| | (59BJN)_LCDR3 | |
| 1340 | VL T30Y (59BJN)_VL | DIQMTQSPSSLSASVGDRVTITCRASQDIYNYLNWYQQKP |
| | | GKAVKLLIYYTSRLHSGVPSRESGSGSGTDYTLTISSLQP |
| | | EDFATYFCQQGDTLPWTFGQGTKLEIK |
| 1341 | VL T30Y (59BJN)_LC | DIQMTQSPSSLSASVGDRVTITCRASQDIYNYLNWYQQKP |
| | | GKAVKLLIYYTSRLHSGVPSRFSGSGSGTDYTLTISSLQP |
| | | EDFATYFCQQGDTLPWTFGQGTKLEIKRTVAAPSVFIFPP |
| | | SDEQLKSGTASVVCLLNNFYPREAKVQWKVDNALQSGNSQ |
| | | ESVTEQDSKDSTYSLSSTLTLSKADYEKHKVYACEVTHQG |
| | | LSSPVTKSENRGEC |
| 1342 | VH W33D I58E W99Y | SYDMH |
| | (60BJN)_HCDR1 | |
| 1343 | VH W33D I58E W99Y | RIDPQSGGEKYAQKFQG |
| | (60BJN)_HCDR2 | |
| 1344 | VH W33D I58E W99Y | YDYGGYFDV |
| | (60BJN)_HCDR3 | |
| 1345 | VH W33D I58E W99Y | EVQLVQSGAEVKKPGASVKVSCKASGYTFTSYDMHWVRQA |
| | (60BJN)_VH | PGQGLEWMGRIDPQSGGEKYAQKFQGRATLTVDTSTSTAY |
| | | MELSRLRSDDTAVYYCARYDYGGYFDVWGQGTLVTVSS |
| 1346 | VH W33D I58E W99Y | EVOLVQSGAEVKKPGASVKVSCKASGYTFTSYDMHWVRQA |
| | (60BJN)_Fab_HC | PGQGLEWMGRIDPQSGGEKYAQKFQGRATLTVDTSTSTAY |
| | | MELSRLRSDDTAVYYCARYDYGGYFDVWGQGTLVTVSSAS |
| | | TKGPSVFPLAPSSKSTSGGTAALGCLVKDYFPEPVTVSWN |
| | | SGALTSGVHTFPAVLQSSGLYSLSSVVTVPSSSLGTQTYI |
| | | CNVNHKPSNTKVDKKVEPKSCDKTHT |
| 1347 | VL T30Y | RASQDIYNYLN |
| | (60BJN)_LCDR1 | |
| 1348 | VL T30Y | YTSRLHS |
| | (60BJN)_LCDR2 | |
| 1349 | VL T30Y | QQGDTLPWT |
| | (60BJN)_LCDR3 | |
| 1350 | VL T30Y (60BJN)_VL | DIQMTQSPSSLSASVGDRVTITCRASQDIYNYLNWYQQKP |
| | | GKAVKLLIYYTSRLHSGVPSRESGSGSGTDYTLTISSLQP |
| | | EDFATYFCQQGDTLPWTFGQGTKLEIK |
| 1351 | VL T30Y (60BJN)_LC | DIQMTQSPSSLSASVGDRVTITCRASQDIYNYLNWYQQKP |
| | | GKAVKLLIYYTSRLHSGVPSRFSGSGSGTDYTLTISSLQP |
| | | EDFATYFCQQGDTLPWTFGQGTKLEIKRTVAAPSVFIFPP |
| | | SDEQLKSGTASVVCLLNNFYPREAKVQWKVDNALQSGNSQ |
| | | ESVTEQDSKDSTYSLSSTLTLSKADYEKHKVYACEVTHQG |
| | | LSSPVTKSFNRGEC |
| 1352 | VH S31D W33D G57D | DYDMH |
| | I58H K59D W99Y Y101H | |
| | (61BJN)_HCDR1 | |
| 1353 | VH S31D W33D G57D | RIDPQSGDHDYAQKFQG |
| | I58H K59D W99Y Y101H | |
| | (61BJN)_HCDR2 | |
| 1354 | VH S31D W33D G57D | YDHGGYFDV |
| | I58H K59D W99Y Y101H | |
| | (61BJN)_HCDR3 | |
| 1355 | VH S31D W33D G57D | EVOLVQSGAEVKKPGASVKVSCKASGYTFTDYDMHWVRQA |
| | I58H K59D W99Y Y101H | PGQGLEWMGRIDPQSGDHDYAQKFQGRATLTVDTSTSTAY |
| | (61BJN)_VH | MELSRLRSDDTAVYYCARYDHGGYFDVWGQGTLVTVSS |
| 1356 | VH S31D W33D G57D | EVQLVQSGAEVKKPGASVKVSCKASGYTFTDYDMHWVRQA |
| | I58H K59D W99Y Y101H | PGQGLEWMGRIDPQSGDHDYAQKFQGRATLTVDTSTSTAY |
| | (61BJN)_Fab_HC | MELSRLRSDDTAVYYCARYDHGGYFDVWGQGTLVTVSSAS |
| | | TKGPSVFPLAPSSKSTSGGTAALGCLVKDYFPEPVTVSWN |
| | | SGALTSGVHTFPAVLQSSGLYSLSSVVTVPSSSLGTQTYI |
| | | CNVNHKPSNTKVDKKVEPKSCDKTHT |
| 1357 | VL T30Y | RASQDIYNYLN |
| | (61BJN)_LCDR1 | |
| 1358 | VL T30Y | YTSRLHS |
| | (61BJN)_LCDR2 | |
| 1359 | VL T30Y | QQGDTLPWT |
| | (61BJN)_LCDR3 | |
| 1360 | VL T30Y (61BJN)_VL | DIQMTQSPSSLSASVGDRVTITCRASQDIYNYLNWYQQKP |
| | | GKAVKLLIYYTSRLHSGVPSRFSGSGSGTDYTLTISSLQP |
| | | EDFATYFCQQGDTLPWTFGQGTKLEIK |
| 1361 | VL T30Y (61BJN)_LC | DIQMTQSPSSLSASVGDRVTITCRASQDIYNYLNWYQQKP |
| | | GKAVKLLIYYTSRLHSGVPSRFSGSGSGTDYTLTISSLQP |
| | | EDFATYFCQQGDTLPWTFGQGTKLEIKRTVAAPSVFIFPP |
| | | SDEQLKSGTASVVCLLNNFYPREAKVQWKVDNALQSGNSQ |
| | | ESVTEQDSKDSTYSLSSTLTLSKADYEKHKVYACEVTHQG |
| | | LSSPVTKSENRGEC |
| 1362 | VH W33D Q54Y S55G | SYDMH |
| | W99Y Y101H | |
| | (62BJN)_HCDR1 | |
| 1363 | VH W33D Q54Y S55G | RIDPYGGGIKYAQKFQG |
| | W99Y Y101H | |
| | (62BJN)_HCDR2 | |
| 1364 | VH W33D Q54Y S55G | YDHGGYFDV |
| | W99Y Y101H | |
| | (62BJN)_HCDR3 | |
| 1365 | VH W33D Q54Y S55G | EVOLVQSGAEVKKPGASVKVSCKASGYTFTSYDMHWVRQA |
| | W99Y Y101H | PGQGLEWMGRIDPYGGGIKYAQKFQGRATLTVDTSTSTAY |
| | (62BJN)_VH | MELSRLRSDDTAVYYCARYDHGGYFDVWGQGTLVTVSS |
| 1366 | VH W33D Q54Y S55G | EVQLVQSGAEVKKPGASVKVSCKASGYTFTSYDMHWVRQA |
| | W99Y Y101H | PGQGLEWMGRIDPYGGGIKYAQKFQGRATLTVDTSTSTAY |
| | (62BJN)_Fab_HC | MELSRLRSDDTAVYYCARYDHGGYFDVWGQGTLVTVSSAS |
| | | TKGPSVFPLAPSSKSTSGGTAALGCLVKDYFPEPVTVSWN |
| | | SGALTSGVHTFPAVLQSSGLYSLSSVVTVPSSSLGTQTYI |
| | | CNVNHKPSNTKVDKKVEPKSCDKTHT |
| 1367 | VL T30Y | RASQDIYNYLN |
| | (62BJN)_LCDR1 | |
| 1368 | VL T30Y | YTSRLHS |
| | (62BJN)_LCDR2 | |
| 1369 | VL T30Y | QQGDTLPWT |
| | (62BJN)_LCDR3 | |
| 1370 | VL T30Y (62BJN)_VL | DIQMTQSPSSLSASVGDRVTITCRASQDIYNYLNWYQQKP |
| | | GKAVKLLIYYTSRLHSGVPSRFSGSGSGTDYTLTISSLQP |
| | | EDFATYFCQQGDTLPWTFGQGTKLEIK |
| 1371 | VL T30Y (62BJN)_LC | DIQMTQSPSSLSASVGDRVTITCRASQDIYNYLNWYQQKP |
| | | GKAVKLLIYYTSRLHSGVPSRESGSGSGTDYTLTISSLQP |
| | | EDFATYFCQQGDTLPWTFGQGTKLEIKRTVAAPSVFIFPP |
| | | SDEQLKSGTASVVCLLNNFYPREAKVQWKVDNALQSGNSQ |
| | | ESVTEQDSKDSTYSLSSTLTLSKADYEKHKVYACEVTHQG |
| | | LSSPVTKSFNRGEC |
| 1372 | VH S31F W33D M34I | FYDIH |
| | (63BJN)_HCDR1 | |
| 1373 | VH S31F W33D M34I | RIDPQSGGIKYAQKFQG |
| | (63BJN)_HCDR2 | |
| 1374 | VH S31F W33D M34I | WDYGGYFDV |
| | (63BJN)_HCDR3 | |
| 1375 | VH S31F W33D M34I | EVQLVQSGAEVKKPGASVKVSCKASGYTFTFYDIHWVRQA |
| | (63BJN)_VH | PGQGLEWMGRIDPQSGGIKYAQKFQGRATLTVDTSTSTAY |
| | | MELSRLRSDDTAVYYCARWDYGGYFDVWGQGTLVTVSS |
| 1376 | VH S31F W33D M34I | EVQLVQSGAEVKKPGASVKVSCKASGYTFTFYDIHWVRQA |
| | (63BJN)_Fab_HC | PGQGLEWMGRIDPQSGGIKYAQKFQGRATLTVDTSTSTAY |
| | | MELSRLRSDDTAVYYCARWDYGGYFDVWGQGTLVTVSSAS |
| | | TKGPSVFPLAPSSKSTSGGTAALGCLVKDYFPEPVTVSWN |
| | | SGALTSGVHTFPAVLQSSGLYSLSSVVTVPSSSLGTQTYI |
| | | CNVNHKPSNTKVDKKVEPKSCDKTHT |
| 1377 | VL T30Y | RASQDIYNYLN |
| | (63BJN)_LCDR1 | |
| 1378 | VL T30Y | YTSRLHS |
| | (63BJN)_LCDR2 | |
| 1379 | VL T30Y | QQGDTLPWT |
| | (63BJN)_LCDR3 | |
| 1380 | VL T30Y (63BJN)_VL | DIQMTQSPSSLSASVGDRVTITCRASQDIYNYLNWYQQKP |
| | | GKAVKLLIYYTSRLHSGVPSRFSGSGSGTDYTLTISSLQP |
| | | EDFATYFCQQGDTLPWTFGQGTKLEIK |
| 1381 | VL T30Y (63BJN)_LC | DIQMTQSPSSLSASVGDRVTITCRASQDIYNYLNWYQQKP |
| | | GKAVKLLIYYTSRLHSGVPSRFSGSGSGTDYTLTISSLQP |
| | | EDFATYFCQQGDTLPWTFGQGTKLEIKRTVAAPSVFIFPP |
| | | SDEQLKSGTASVVCLLNNFYPREAKVQWKVDNALQSGNSQ |
| | | ESVTEQDSKDSTYSLSSTLTLSKADYEKHKVYACEVTHQG |
| | | LSSPVTKSENRGEC |
| 1382 | VH S31T I58S | TYWMH |
| | (64BJN)_HCDR1 | |
| 1383 | VH S31T I58S | RIDPQSGGSKYAQKFQG |
| | (64BJN)_HCDR2 | |
| 1384 | VH S31T I58S | WDYGGYFDV |
| | (64BJN)_HCDR3 | |
| 1385 | VH S31T I58S | EVQLVQSGAEVKKPGASVKVSCKASGYTFTTYWMHWVRQA |
| | (64BJN)_VH | PGQGLEWMGRIDPQSGGSKYAQKFQGRATLTVDTSTSTAY |
| | | MELSRLRSDDTAVYYCARWDYGGYFDVWGQGTLVTVSS |
| 1386 | VH S31T I58S | EVOLVQSGAEVKKPGASVKVSCKASGYTFTTYWMHWVRQA |
| | (64BJN)_Fab_HC | PGQGLEWMGRIDPQSGGSKYAQKFQGRATLTVDTSTSTAY |
| | | MELSRLRSDDTAVYYCARWDYGGYFDVWGQGTLVTVSSAS |
| | | TKGPSVFPLAPSSKSTSGGTAALGCLVKDYFPEPVTVSWN |
| | | SGALTSGVHTFPAVLQSSGLYSLSSVVTVPSSSLGTQTYI |
| | | CNVNHKPSNTKVDKKVEPKSCDKTHT |
| 1387 | VL T30Y R53H | RASQDIYNYLN |
| | (64BJN)_LCDR1 | |
| 1388 | VL T30Y R53H | YTSHLHS |
| | (64BJN)_LCDR2 | |
| 1389 | VL T30Y R53H | QQGDTLPWT |
| | (64BJN)_LCDR3 | |
| 1390 | VL T30Y R53H | DIQMTQSPSSLSASVGDRVTITCRASQDIYNYLNWYQQKP |
| | (64BJN)_VL | GKAVKLLIYYTSHLHSGVPSRFSGSGSGTDYTLTISSLQP |
| | | EDFATYFCQQGDTLPWTFGQGTKLEIK |
| 1391 | VL T30Y R53H | DIQMTQSPSSLSASVGDRVTITCRASQDIYNYLNWYQQKP |
| | (64BJN)_LC | GKAVKLLIYYTSHLHSGVPSRFSGSGSGTDYTLTISSLQP |
| | | EDFATYFCQQGDTLPWTFGQGTKLEIKRTVAAPSVFIFPP |
| | | SDEQLKSGTASVVCLLNNFYPREAKVQWKVDNALQSGNSQ |
| | | ESVTEQDSKDSTYSLSSTLTLSKADYEKHKVYACEVTHQG |
| | | LSSPVTKSENRGEC |
| 1392 | VH W33D M34L W99Y | SYDLH |
| | Y101Q (65BJN)_HCDR1 | |
| 1393 | VH W33D M34L W99Y | RIDPQSGGIKYAQKFQG |
| | Y101Q (65BJN)_HCDR2 | |
| 1394 | VH W33D M34L W99Y | YDQGGYFDV |
| | Y101Q (65BJN)_HCDR3 | |
| 1395 | VH W33D M34L W99Y | EVQLVQSGAEVKKPGASVKVSCKASGYTFTSYDLHWVRQA |
| | Y101Q (65BJN)_VH | PGQGLEWMGRIDPQSGGIKYAQKFQGRATLTVDTSTSTAY |
| | | MELSRLRSDDTAVYYCARYDQGGYFDVWGQGTLVTVSS |
| 1396 | VH W33D M34L W99Y | EVOLVQSGAEVKKPGASVKVSCKASGYTFTSYDLHWVRQA |
| | Y101Q (65BJN)_Fab_HC | PGQGLEWMGRIDPQSGGIKYAQKFQGRATLTVDTSTSTAY |
| | | MELSRLRSDDTAVYYCARYDOGGYFDVWGQGTLVTVSSAS |
| | | TKGPSVFPLAPSSKSTSGGTAALGCLVKDYFPEPVTVSWN |
| | | SGALTSGVHTFPAVLQSSGLYSLSSVVTVPSSSLGTQTYI |
| | | CNVNHKPSNTKVDKKVEPKSCDKTHT |
| 1397 | VL T30Y N31Y | RASQDIYYYLN |
| | (65BJN)_LCDR1 | |
| 1398 | VL T30Y N31Y | YTSRLHS |
| | (65BJN)_LCDR2 | |
| 1399 | VL T30Y N31Y | QQGDTLPWT |
| | (65BJN)_LCDR3 | |
| 1400 | VL T30Y N31Y | DIQMTQSPSSLSASVGDRVTITCRASQDIYYYLNWYQQKP |
| | (65BJN)_VL | GKAVKLLIYYTSRLHSGVPSRESGSGSGTDYTLTISSLQP |
| | | EDFATYFCQQGDTLPWTFGQGTKLEIK |
| 1401 | VL T30Y N31Y | DIQMTQSPSSLSASVGDRVTITCRASQDIYYYLNWYQQKP |
| | (65BJN)_LC | GKAVKLLIYYTSRLHSGVPSRESGSGSGTDYTLTISSLQP |
| | | EDFATYFCQQGDTLPWTFGQGTKLEIKRTVAAPSVFIFPP |
| | | SDEQLKSGTASVVCLLNNFYPREAKVQWKVDNALQSGNSQ |
| | | ESVTEQDSKDSTYSLSSTLTLSKADYEKHKVYACEVTHQG |
| | | LSSPVTKSFNRGEC |
| 1402 | VH W33D S55T Y101H | SYDMH |
| | (66BJN)_HCDR1 | |
| 1403 | VH W33D S55T Y101H | RIDPQTGGIKYAQKFQG |
| | (66BJN)_HCDR2 | |
| 1404 | VH W33D S55T Y101H | WDHGGYFDV |
| | (66BJN)_HCDR3 | |
| 1405 | VH W33D S55T Y101H | EVOLVQSGAEVKKPGASVKVSCKASGYTFTSYDMHWVRQA |
| | (66BJN)_VH | PGQGLEWMGRIDPQTGGIKYAQKFQGRATLTVDTSTSTAY |
| | | MELSRLRSDDTAVYYCARWDHGGYFDVWGQGTLVTVSS |
| 1406 | VH W33D S55T Y101H | EVOLVQSGAEVKKPGASVKVSCKASGYTFTSYDMHWVRQA |
| | (66BJN)_Fab_HC | PGQGLEWMGRIDPQTGGIKYAQKFQGRATLTVDTSTSTAY |
| | | MELSRLRSDDTAVYYCARWDHGGYFDVWGQGTLVTVSSAS |
| | | TKGPSVFPLAPSSKSTSGGTAALGCLVKDYFPEPVTVSWN |
| | | SGALTSGVHTFPAVLQSSGLYSLSSVVTVPSSSLGTQTYI |
| | | CNVNHKPSNTKVDKKVEPKSCDKTHT |
| 1407 | VL T30Y L94Q | RASQDIYNYLN |
| | (66BJN)_LCDR1 | |
| 1408 | VL T30Y L94Q | YTSRLHS |
| | (66BJN)_LCDR2 | |
| 1409 | VL T30Y L94Q | QQGDTQPWT |
| | (66BJN)_LCDR3 | |
| 1410 | VL T30Y L94Q | DIQMTQSPSSLSASVGDRVTITCRASQDIYNYLNWYQQKP |
| | (66BJN)_VL | GKAVKLLIYYTSRLHSGVPSRFSGSGSGTDYTLTISSLQP |
| | | EDFATYFCQQGDTQPWTFGQGTKLEIK |
| 1411 | VL T30Y L94Q | DIQMTQSPSSLSASVGDRVTITCRASQDIYNYLNWYQQKP |
| | (66BJN)_LC | GKAVKLLIYYTSRLHSGVPSRESGSGSGTDYTLTISSLQP |
| | | EDFATYFCQQGDTQPWTFGQGTKLEIKRTVAAPSVFIFPP |
| | | SDEQLKSGTASVVCLLNNFYPREAKVQWKVDNALQSGNSQ |
| | | ESVTEQDSKDSTYSLSSTLTLSKADYEKHKVYACEVTHQG |
| | | LSSPVTKSENRGEC |
| 1412 | VH W33D | SYDMH |
| | (67BJN)_HCDR1 | |
| 1413 | VH W33D | RIDPQSGGIKYAQKFQG |
| | (67BJN)_HCDR2 | |
| 1414 | VH W33D | WDYGGYFDV |
| | (67BJN)_HCDR3 | |
| 1415 | VH W33D (67BJN)_VH | EVOLVQSGAEVKKPGASVKVSCKASGYTFTSYDMHWVRQA |
| | | PGQGLEWMGRIDPQSGGIKYAQKFQGRATLTVDTSTSTAY |
| | | MELSRLRSDDTAVYYCARWDYGGYFDVWGQGTLVTVSS |
| 1416 | VH W33D | EVQLVQSGAEVKKPGASVKVSCKASGYTFTSYDMHWVRQA |
| | (67BJN)_Fab_HC | PGQGLEWMGRIDPQSGGIKYAQKFQGRATLTVDTSTSTAY |
| | | MELSRLRSDDTAVYYCARWDYGGYFDVWGQGTLVTVSSAS |
| | | TKGPSVFPLAPSSKSTSGGTAALGCLVKDYFPEPVTVSWN |
| | | SGALTSGVHTFPAVLQSSGLYSLSSVVTVPSSSLGTQTYI |
| | | CNVNHKPSNTKVDKKVEPKSCDKTHT |
| 1417 | VL T30Y R53V | RASQDIYNYLN |
| | (67BJN)_LCDR1 | |
| 1418 | VL T30Y R53V | YTSVLHS |
| | (67BJN)_LCDR2 | |
| 1419 | VL T30Y R53V | QQGDTLPWT |
| | (67BJN)_LCDR3 | |
| 1420 | VL T30Y R53V | DIQMTQSPSSLSASVGDRVTITCRASQDIYNYLNWYQQKP |
| | (67BJN)_VL | GKAVKLLIYYTSVLHSGVPSRESGSGSGTDYTLTISSLQP |
| | | EDFATYFCQQGDTLPWTFGQGTKLEIK |
| 1421 | VL T30Y R53V | DIQMTQSPSSLSASVGDRVTITCRASQDIYNYLNWYQQKP |
| | (67BJN)_LC | GKAVKLLIYYTSVLHSGVPSRFSGSGSGTDYTLTISSLQP |
| | | EDFATYFCQQGDTLPWTFGQGTKLEIKRTVAAPSVFIFPP |
| | | SDEQLKSGTASVVCLLNNFYPREAKVQWKVDNALQSGNSQ |
| | | ESVTEQDSKDSTYSLSSTLTLSKADYEKHKVYACEVTHQG |
| | | LSSPVTKSFNRGEC |
| 1422 | VH H35Q S55D S57D | SYWMQ |
| | W99Y (68BJN)_HCDR1 | |
| 1423 | VH H35Q S55D S57D | RIDPQDGDIKYAQKFQG |
| | W99Y (68BJN)_HCDR2 | |
| 1424 | VH H35Q S55D S57D | YDYGGYFDV |
| | W99Y (68BJN)_HCDR3 | |
| 1425 | VH H35Q S55D S57D | EVQLVQSGAEVKKPGASVKVSCKASGYTFTSYWMQWVRQA |
| | W99Y (68BJN)_VH | PGQGLEWMGRIDPQDGDIKYAQKFQGRATLTVDTSTSTAY |
| | | MELSRLRSDDTAVYYCARYDYGGYFDVWGQGTLVTVSS |
| 1426 | VH H35Q S55D S57D | EVQLVQSGAEVKKPGASVKVSCKASGYTFTSYWMQWVRQA |
| | W99Y (68BJN)_Fab_HC | PGQGLEWMGRIDPQDGDIKYAQKFQGRATLTVDTSTSTAY |
| | | MELSRLRSDDTAVYYCARYDYGGYFDVWGQGTLVTVSSAS |
| | | TKGPSVFPLAPSSKSTSGGTAALGCLVKDYFPEPVTVSWN |
| | | SGALTSGVHTFPAVLQSSGLYSLSSVVTVPSSSLGTQTYI |
| | | CNVNHKPSNTKVDKKVEPKSCDKTHT |
| 1427 | VL T30Y R53V | RASQDIYNYLN |
| | (68BJN)_LCDR1 | |
| 1428 | VL T30Y R53V | YTSVLHS |
| | (68BJN)_LCDR2 | |
| 1429 | VL T30Y R53V | QQGDTLPWT |
| | (68BJN)_LCDR3 | |
| 1430 | VL T30Y R53V | DIQMTQSPSSLSASVGDRVTITCRASQDIYNYLNWYQQKP |
| | (68BJN)_VL | GKAVKLLIYYTSVLHSGVPSRFSGSGSGTDYTLTISSLQP |
| | | EDFATYFCQQGDTLPWTFGQGTKLEIK |
| 1431 | VL T30Y R53V | DIQMTQSPSSLSASVGDRVTITCRASQDIYNYLNWYQQKP |
| | (68BJN)_LC | GKAVKLLIYYTSVLHSGVPSRFSGSGSGTDYTLTISSLQP |
| | | EDFATYFCQQGDTLPWTFGQGTKLEIKRTVAAPSVFIFPP |
| | | SDEQLKSGTASVVCLLNNFYPREAKVQWKVDNALQSGNSQ |
| | | ESVTEQDSKDSTYSLSSTLTLSKADYEKHKVYACEVTHQG |
| | | LSSPVTKSENRGEC |
| 1432 | VH W33D I58T | SYDMH |
| | (69BJN)_HCDR1 | |
| 1433 | VH W33D I58T | RIDPQSGGTKYAQKFQG |
| | (69BJN)_HCDR2 | |
| 1434 | VH W33D I58T | WDYGGYFDV |
| | (69BJN)_HCDR3 | |
| 1435 | VH W33D I58T | EVQLVQSGAEVKKPGASVKVSCKASGYTFTSYDMHWVRQA |
| | (69BJN)_VH | PGQGLEWMGRIDPQSGGTKYAQKFQGRATLTVDTSTSTAY |
| | | MELSRLRSDDTAVYYCARWDYGGYFDVWGQGTLVTVSS |
| 1436 | VH W33D I58T | EVQLVQSGAEVKKPGASVKVSCKASGYTFTSYDMHWVRQA |
| | (69BJN)_Fab_HC | PGQGLEWMGRIDPQSGGTKYAQKFQGRATLTVDTSTSTAY |
| | | MELSRLRSDDTAVYYCARWDYGGYFDVWGQGTLVTVSSAS |
| | | TKGPSVFPLAPSSKSTSGGTAALGCLVKDYFPEPVTVSWN |
| | | SGALTSGVHTFPAVLQSSGLYSLSSVVTVPSSSLGTQTYI |
| | | CNVNHKPSNTKVDKKVEPKSCDKTHT |
| 1437 | VL T30Y R53V | RASQDIYNYLN |
| | (69BJN)_LCDR1 | |
| 1438 | VL T30Y R53V | YTSVLHS |
| | (69BJN)_LCDR2 | |
| 1439 | VL T30Y R53V | QQGDTLPWT |
| | (69BJN)_LCDR3 | |
| 1440 | VL T30Y R53V | DIQMTQSPSSLSASVGDRVTITCRASQDIYNYLNWYQQKP |
| | (69BJN)_VL | GKAVKLLIYYTSVLHSGVPSRFSGSGSGTDYTLTISSLQP |
| | | EDFATYFCQQGDTLPWTFGQGTKLEIK |
| 1441 | VL T30Y R53V | DIQMTQSPSSLSASVGDRVTITCRASQDIYNYLNWYQQKP |
| | (69BJN)_LC | GKAVKLLIYYTSVLHSGVPSRFSGSGSGTDYTLTISSLQP |
| | | EDFATYFCQQGDTLPWTFGQGTKLEIKRTVAAPSVFIFPP |
| | | SDEQLKSGTASVVCLLNNFYPREAKVQWKVDNALQSGNSQ |
| | | ESVTEQDSKDSTYSLSSTLTLSKADYEKHKVYACEVTHQG |
| | | LSSPVTKSENRGEC |
| 1442 | VH W33D S55T G57D | SYDMH |
| | Y104Q (71BJN)_HCDR1 | |
| 1443 | VH W33D S55T G57D | RIDPQTGDIKYAQKFQG |
| | Y104Q (71BJN)_HCDR2 | |
| 1444 | VH W33D S55T G57D | WDYGGQFDV |
| | Y104Q (71BJN)_HCDR3 | |
| 1445 | VH W33D S55T G57D | EVQLVQSGAEVKKPGASVKVSCKASGYTFTSYDMHWVRQA |
| | Y104Q (71BJN)_VH | PGQGLEWMGRIDPQTGDIKYAQKFQGRATLTVDTSTSTAY |
| | | MELSRLRSDDTAVYYCARWDYGGQFDVWGQGTLVTVSS |
| 1446 | VH W33D S55T G57D | EVOLVQSGAEVKKPGASVKVSCKASGYTFTSYDMHWVRQA |
| | Y104Q (71BJN)_Fab_HC | PGQGLEWMGRIDPQTGDIKYAQKFQGRATLTVDTSTSTAY |
| | | MELSRLRSDDTAVYYCARWDYGGQFDVWGQGTLVTVSSAS |
| | | TKGPSVFPLAPSSKSTSGGTAALGCLVKDYFPEPVTVSWN |
| | | SGALTSGVHTFPAVLQSSGLYSLSSVVTVPSSSLGTQTYI |
| | | CNVNHKPSNTKVDKKVEPKSCDKTHT |
| 1447 | VL T30Y R53G | RASQDIYNYLN |
| | (71BJN)_LCDR1 | |
| 1448 | VL T30Y R53G | YTSGLHS |
| | (71BJN)_LCDR2 | |
| 1449 | VL T30Y R53G | QQGDTLPWT |
| | (71BJN)_LCDR3 | |
| 1450 | VL T30Y R53G | DIQMTQSPSSLSASVGDRVTITCRASQDIYNYLNWYQQKP |
| | (71BJN)_VL | GKAVKLLIYYTSGLHSGVPSRESGSGSGTDYTLTISSLQP |
| | | EDFATYFCQQGDTLPWTFGQGTKLEIK |
| 1451 | VL T30Y R53G | DIQMTQSPSSLSASVGDRVTITCRASQDIYNYLNWYQQKP |
| | (71BJN)_LC | GKAVKLLIYYTSGLHSGVPSRESGSGSGTDYTLTISSLQP |
| | | EDFATYFCQQGDTLPWTFGQGTKLEIKRTVAAPSVFIFPP |
| | | SDEQLKSGTASVVCLLNNFYPREAKVQWKVDNALQSGNSQ |
| | | ESVTEQDSKDSTYSLSSTLTLSKADYEKHKVYACEVTHQG |
| | | LSSPVTKSENRGEC |
| 1452 | VH S31Q W33D W99Y | QYDMH |
| | (72BJN)_HCDR1 | |
| 1453 | VH S31Q W33D W99Y | RIDPQSGGIKYAQKFQG |
| | (72BJN)_HCDR2 | |
| 1454 | VH S31Q W33D W99Y | YDYGGYFDV |
| | (72BJN)_HCDR3 | |
| 1455 | VH S31Q W33D W99Y | EVQLVQSGAEVKKPGASVKVSCKASGYTFTQYDMHWVRQA |
| | (72BJN)_VH | PGQGLEWMGRIDPQSGGIKYAQKFQGRATLTVDTSTSTAY |
| | | MELSRLRSDDTAVYYCARYDYGGYFDVWGQGTLVTVSS |
| 1456 | VH S31Q W33D W99Y | EVOLVQSGAEVKKPGASVKVSCKASGYTFTQYDMHWVRQA |
| | (72BJN)_Fab_HC | PGQGLEWMGRIDPQSGGIKYAQKFQGRATLTVDTSTSTAY |
| | | MELSRLRSDDTAVYYCARYDYGGYFDVWGQGTLVTVSSAS |
| | | TKGPSVFPLAPSSKSTSGGTAALGCLVKDYFPEPVTVSWN |
| | | SGALTSGVHTFPAVLQSSGLYSLSSVVTVPSSSLGTQTYI |
| | | CNVNHKPSNTKVDKKVEPKSCDKTHT |
| 1457 | VL T30Y R53I | RASQDIYNYLN |
| | (72BJN)_LCDR1 | |
| 1458 | VL T30Y R53I | YTSILHS |
| | (72BJN)_LCDR2 | |
| 1459 | VL T30Y R53I | QQGDTLPWT |
| | (72BJN)_LCDR3 | |
| 1460 | VL T30Y R53I | DIQMTQSPSSLSASVGDRVTITCRASQDIYNYLNWYQQKP |
| | (72BJN)_VL | GKAVKLLIYYTSILHSGVPSRFSGSGSGTDYTLTISSLQP |
| | | EDFATYFCQQGDTLPWTFGQGTKLEIK |
| 1461 | VL T30Y R53I | DIQMTQSPSSLSASVGDRVTITCRASQDIYNYLNWYQQKP |
| | (72BJN)_LC | GKAVKLLIYYTSILHSGVPSRFSGSGSGTDYTLTISSLQP |
| | | EDFATYFCQQGDTLPWTFGQGTKLEIKRTVAAPSVFIFPP |
| | | SDEQLKSGTASVVCLLNNFYPREAKVQWKVDNALQSGNSQ |
| | | ESVTEQDSKDSTYSLSSTLTLSKADYEKHKVYACEVTHQG |
| | | LSSPVTKSFNRGEC |
| 1462 | VH W33D | SYDMH |
| | (73BJN)_HCDR1 | |
| 1463 | VH W33D | RIDPQSGGIKYAQKFQG |
| | (73BJN)_HCDR2 | |
| 1464 | VH W33D | WDYGGYFDV |
| | (73BJN)_HCDR3 | |
| 1465 | VH W33D (73BJN)_VH | EVOLVQSGAEVKKPGASVKVSCKASGYTFTSYDMHWVRQA |
| | | PGQGLEWMGRIDPQSGGIKYAQKFQGRATLTVDTSTSTAY |
| | | MELSRLRSDDTAVYYCARWDYGGYFDVWGQGTLVTVSS |
| 1466 | VH W33D | EVQLVQSGAEVKKPGASVKVSCKASGYTFTSYDMHWVRQA |
| | (73BJN)_Fab_HC | PGQGLEWMGRIDPQSGGIKYAQKFQGRATLTVDTSTSTAY |
| | | MELSRLRSDDTAVYYCARWDYGGYFDVWGQGTLVTVSSAS |
| | | TKGPSVFPLAPSSKSTSGGTAALGCLVKDYFPEPVTVSWN |
| | | SGALTSGVHTFPAVLQSSGLYSLSSVVTVPSSSLGTQTYI |
| | | CNVNHKPSNTKVDKKVEPKSCDKTHT |
| 1467 | VL T30Y | RASQDIYNYLN |
| | (73BJN)_LCDR1 | |
| 1468 | VL T30Y | YTSRLHS |
| | (73BJN)_LCDR2 | |
| 1469 | VL T30Y | QQGDTLPWT |
| | (73BJN)_LCDR3 | |
| 1470 | VL T30Y (73BJN)_VL | DIQMTQSPSSLSASVGDRVTITCRASQDIYNYLNWYQQKP |
| | | GKAVKLLIYYTSRLHSGVPSRFSGSGSGTDYTLTISSLQP |
| | | EDFATYFCQQGDTLPWTFGQGTKLEIK |
| 1471 | VL T30Y (73BJN)_LC | DIQMTQSPSSLSASVGDRVTITCRASQDIYNYLNWYQQKP |
| | | GKAVKLLIYYTSRLHSGVPSRFSGSGSGTDYTLTISSLQP |
| | | EDFATYFCQQGDTLPWTFGQGTKLEIKRTVAAPSVFIFPP |
| | | SDEQLKSGTASVVCLLNNFYPREAKVQWKVDNALQSGNSQ |
| | | ESVTEQDSKDSTYSLSSTLTLSKADYEKHKVYACEVTHQG |
| | | LSSPVTKSENRGEC |
| 1472 | VH S31Y W33D M34L | YYDLH |
| | (74BJN)_HCDR1 | |
| 1473 | VH S31Y W33D M34L | RIDPQSGGIKYAQKFQG |
| | (74BJN)_HCDR2 | |
| 1474 | VH S31Y W33D M34L | WDYGGYFDV |
| | (74BJN)_HCDR3 | |
| 1475 | VH S31Y W33D M34L | EVQLVQSGAEVKKPGASVKVSCKASGYTFTYYDLHWVRQA |
| | (74BJN)_VH | PGQGLEWMGRIDPQSGGIKYAQKFQGRATLTVDTSTSTAY |
| | | MELSRLRSDDTAVYYCARWDYGGYFDVWGQGTLVTVSS |
| 1476 | VH S31Y W33D M34L | EVQLVQSGAEVKKPGASVKVSCKASGYTFTYYDLHWVRQA |
| | (74BJN)_Fab_HC | PGQGLEWMGRIDPQSGGIKYAQKFQGRATLTVDTSTSTAY |
| | | MELSRLRSDDTAVYYCARWDYGGYFDVWGQGTLVTVSSAS |
| | | TKGPSVFPLAPSSKSTSGGTAALGCLVKDYFPEPVTVSWN |
| | | SGALTSGVHTFPAVLQSSGLYSLSSVVTVPSSSLGTQTYI |
| | | CNVNHKPSNTKVDKKVEPKSCDKTHT |
| 1477 | VL T30Y T93D L94I | RASQDIYNYLNW |
| | (74BJN)_LCDR1 | |
| 1478 | VL T30Y T93D L94I | YTSRLHS |
| | (74BJN)_LCDR2 | |
| 1479 | VL T30Y T93D L94I | QQGDDIPWTF |
| | (74BJN)_LCDR3 | |
| 1480 | VL T30Y T93D L94I | DIQMTQSPSSLSASVGDRVTITCRASQDIYNYLNWYQQKP |
| | (74BJN)_VL | GKAVKLLIYYTSRLHSGVPSRFSGSGSGTDYTLTISSLQP |
| | | EDFATYFCQQGDDIPWTFGQGTKLEIK |
| 1481 | VL T30Y T93D L94I | DIQMTQSPSSLSASVGDRVTITCRASQDIYNYLNWYQQKP |
| | (74BJN)_LC | GKAVKLLIYYTSRLHSGVPSRFSGSGSGTDYTLTISSLQP |
| | | EDFATYFCQQGDDIPWTFGQGTKLEIKRTVAAPSVFIFPP |
| | | SDEQLKSGTASVVCLLNNFYPREAKVQWKVDNALQSGNSQ |
| | | ESVTEQDSKDSTYSLSSTLTLSKADYEKHKVYACEVTHQG |
| | | LSSPVTKSENRGEC |
| 1482 | VH S31K W33D S55D | KYDMH |
| | I58F (75BJN)_HCDR1 | |
| 1483 | VH S31K W33D S55D | RIDPQDGGFKYAQKFQG |
| | I58F (75BJN)_HCDR2 | |
| 1484 | VH S31K W33D S55D | WDYGGYFDV |
| | I58F (75BJN)_HCDR3 | |
| 1485 | VH S31K W33D S55D | EVQLVQSGAEVKKPGASVKVSCKASGYTFTKYDMHWVRQA |
| | I58F (75BJN)_VH | PGQGLEWMGRIDPQDGGFKYAQKFQGRATLTVDTSTSTAY |
| | | MELSRLRSDDTAVYYCARWDYGGYFDVWGQGTLVTVSS |
| 1486 | VH S31K W33D S55D | EVOLVQSGAEVKKPGASVKVSCKASGYTFTKYDMHWVRQA |
| | I58F (75BJN)_Fab_HC | PGQGLEWMGRIDPQDGGFKYAQKFQGRATLTVDTSTSTAY |
| | | MELSRLRSDDTAVYYCARWDYGGYFDVWGQGTLVTVSSAS |
| | | TKGPSVFPLAPSSKSTSGGTAALGCLVKDYFPEPVTVSWN |
| | | SGALTSGVHTFPAVLQSSGLYSLSSVVTVPSSSLGTQTYI |
| | | CNVNHKPSNTKVDKKVEPKSCDKTHT |
| 1487 | VL T30Y R53Y T93E | RASQDIFNYLN |
| | (75BJN)_LCDR1 | |
| 1488 | VL T30Y R53Y T93E | YTSYLHS |
| | (75BJN)_LCDR2 | |
| 1489 | VL T30Y R53Y T93E | QQGDELPWT |
| | (75BJN)_LCDR3 | |
| 1490 | VL T30Y R53Y T93E | DIQMTQSPSSLSASVGDRVTITCRASQDIFNYLNWYQQKP |
| | (75BJN)_VL | GKAVKLLIYYTSYLHSGVPSRESGSGSGTDYTLTISSLQP |
| | | EDFATYFCQQGDELPWTFGQGTKLEIK |
| 1491 | VL T30Y R53Y T93E | DIQMTQSPSSLSASVGDRVTITCRASQDIFNYLNWYQQKP |
| | (75BJN)_LC | GKAVKLLIYYTSYLHSGVPSRFSGSGSGTDYTLTISSLQP |
| | | EDFATYFCQQGDELPWTFGQGTKLEIKRTVAAPSVFIFPP |
| | | SDEQLKSGTASVVCLLNNFYPREAKVQWKVDNALQSGNSQ |
| | | ESVTEQDSKDSTYSLSSTLTLSKADYEKHKVYACEVTHQG |
| | | LSSPVTKSENRGEC |
| 1492 | VH S31Y W33D Q54Y | YYDMH |
| | S55D G57D | |
| | (76BJN)_HCDR1 | |
| 1493 | VH S31Y W33D Q54Y | RIDPYDGDIKYAQKFQG |
| | S55D G57D | |
| | (76BJN) | |
| 1494 | VH S31Y W33D Q54Y | WDYGGYFDV |
| | S55D G57D | |
| | (76BJN)_HCDR3 | |
| 1495 | VH S31Y W33D Q54Y | EVQLVQSGAEVKKPGASVKVSCKASGYTFTYYDMHWVRQA |
| | S55D G57D (76BJN)_VH | PGQGLEWMGRIDPYDGDIKYAQKFQGRATLTVDTSTSTAY |
| | | MELSRLRSDDTAVYYCARWDYGGYFDVWGQGTLVTVSS |
| 1496 | VH S31Y W33D Q54Y | EVQLVQSGAEVKKPGASVKVSCKASGYTFTYYDMHWVRQA |
| | S55D G57D | PGQGLEWMGRIDPYDGDIKYAQKFQGRATLTVDTSTSTAY |
| | (76BJN)_Fab_HC | MELSRLRSDDTAVYYCARWDYGGYFDVWGQGTLVTVSSAS |
| | | TKGPSVFPLAPSSKSTSGGTAALGCLVKDYFPEPVTVSWN |
| | | SGALTSGVHTFPAVLQSSGLYSLSSVVTVPSSSLGTQTYI |
| | | CNVNHKPSNTKVDKKVEPKSCDKTHT |
| 1497 | VL T30Y R53L T93E | RASQDIYNYLN |
| | (76BJN)_LCDR1 | |
| 1498 | VL T30Y R53L T93E | YTSLLHS |
| | (76BJN)_LCDR2 | |
| 1499 | VL T30Y R53L T93E | QQGDELPWT |
| | (76BJN)_LCDR3 | |
| 1500 | VL T30Y R53L T93E | DIQMTQSPSSLSASVGDRVTITCRASQDIYNYLNWYQQKP |
| | (76BJN)_VL | GKAVKLLIYYTSLLHSGVPSRESGSGSGTDYTLTISSLQP |
| | | EDFATYFCQQGDELPWTFGQGTKLEIK |
| 1501 | VL T30Y R53L T93E | DIQMTQSPSSLSASVGDRVTITCRASQDIYNYLNWYQQKP |
| | (76BJN)_LC | GKAVKLLIYYTSLLHSGVPSRFSGSGSGTDYTLTISSLQP |
| | | EDFATYFCQQGDELPWTFGQGTKLEIKRTVAAPSVFIFPP |
| | | SDEQLKSGTASVVCLLNNFYPREAKVQWKVDNALQSGNSQ |
| | | ESVTEQDSKDSTYSLSSTLTLSKADYEKHKVYACEVTHQG |
| | | LSSPVTKSFNRGEC |
| 1502 | VH W33D I58V | SYDMH |
| | (77BJN)_HCDR1 | |
| 1503 | VH W33D I58V | RIDPQSGGVKYAQKFQG |
| | (77BJN)_HCDR2 | |
| 1504 | VH W33D I58V | WDYGGYFDV |
| | (77BJN)_HCDR3 | |
| 1505 | VH W33D I58V | EVQLVQSGAEVKKPGASVKVSCKASGYTFTSYDMHWVRQA |
| | (77BJN)_VH | PGQGLEWMGRIDPQSGGVKYAQKFQGRATLTVDTSTSTAY |
| | | MELSRLRSDDTAVYYCARWDYGGYFDVWGQGTLVTVSS |
| 1506 | VH W33D I58V | EVQLVQSGAEVKKPGASVKVSCKASGYTFTSYDMHWVRQA |
| | (77BJN)_Fab_HC | PGQGLEWMGRIDPQSGGVKYAQKFQGRATLTVDTSTSTAY |
| | | MELSRLRSDDTAVYYCARWDYGGYFDVWGQGTLVTVSSAS |
| | | TKGPSVFPLAPSSKSTSGGTAALGCLVKDYFPEPVTVSWN |
| | | SGALTSGVHTFPAVLQSSGLYSLSSVVTVPSSSLGTQTYI |
| | | CNVNHKPSNTKVDKKVEPKSCDKTHT |
| 1507 | VL T30Y R53V T93E | RASQDIYNYLN |
| | (77BJN)_LCDR1 | |
| 1508 | VL T30Y R53V T93E | YTSVLHS |
| | (77BJN)_LCDR2 | |
| 1509 | VL T30Y R53V T93E | QQGDELPWTF |
| | (77BJN)_LCDR3 | |
| 1510 | VL T30Y R53V T93E | DIQMTQSPSSLSASVGDRVTITCRASQDIYNYLNWYQQKP |
| | (77BJN)_VL | GKAVKLLIYYTSVLHSGVPSRFSGSGSGTDYTLTISSLQP |
| | | EDFATYFCQQGDELPWTFGQGTKLEIK |
| 1511 | VL T30Y R53V T93E | DIQMTQSPSSLSASVGDRVTITCRASQDIYNYLNWYQQKP |
| | (77BJN)_LC | GKAVKLLIYYTSVLHSGVPSRFSGSGSGTDYTLTISSLQP |
| | | EDFATYFCQQGDELPWTFGQGTKLEIKRTVAAPSVFIFPP |
| | | SDEQLKSGTASVVCLLNNFYPREAKVQWKVDNALQSGNSQ |
| | | ESVTEQDSKDSTYSLSSTLTLSKADYEKHKVYACEVTHQG |
| | | LSSPVTKSFNRGEC |
| 1512 | VH W33D K59R | SYDMH |
| | (78BJN)_HCDR1 | |
| 1513 | VH W33D K59R | RIDPQSGGIRYAQKFQG |
| | (78BJN)_HCDR2 | |
| 1514 | VH W33D K59R | WDYGGYFDV |
| | (78BJN)_HCDR3 | |
| 1515 | VH W33D K59R | EVOLVQSGAEVKKPGASVKVSCKASGYTFTSYDMHWVRQA |
| | (78BJN)_VH | PGQGLEWMGRIDPQSGGIRYAQKFQGRATLTVDTSTSTAY |
| | | MELSRLRSDDTAVYYCARWDYGGYFDVWGQGTLVTVSS |
| 1516 | VH W33D K59R | EVQLVQSGAEVKKPGASVKVSCKASGYTFTSYDMHWVRQA |
| | (78BJN)_Fab_HC | PGQGLEWMGRIDPQSGGIRYAQKFQGRATLTVDTSTSTAY |
| | | MELSRLRSDDTAVYYCARWDYGGYFDVWGQGTLVTVSSAS |
| | | TKGPSVFPLAPSSKSTSGGTAALGCLVKDYFPEPVTVSWN |
| | | SGALTSGVHTFPAVLQSSGLYSLSSVVTVPSSSLGTQTYI |
| | | CNVNHKPSNTKVDKKVEPKSCDKTHT |
| 1517 | VL T30Y R53N T93E | RASQDIYNYLN |
| | (78BJN)_LCDR1 | |
| 1518 | VL T30Y R53N T93E | YTSNLHS |
| | (78BJN)_LCDR2 | |
| 1519 | VL T30Y R53N T93E | QQGDELPWT |
| | (78BJN)_LCDR3 | |
| 1520 | VL T30Y R53N T93E | DIQMTQSPSSLSASVGDRVTITCRASQDIYNYLNWYQQKP |
| | (78BJN)_VL | GKAVKLLIYYTSNLHSGVPSRFSGSGSGTDYTLTISSLQP |
| | | EDFATYFCQQGDELPWTFGQGTKLEIK |
| 1521 | VL T30Y R53N T93E | DIQMTQSPSSLSASVGDRVTITCRASQDIYNYLNWYQQKP |
| | (78BJN)_LC | GKAVKLLIYYTSNLHSGVPSRFSGSGSGTDYTLTISSLQP |
| | | EDFATYFCQQGDELPWTFGQGTKLEIKRTVAAPSVFIFPP |
| | | SDEQLKSGTASVVCLLNNFYPREAKVQWKVDNALQSGNSQ |
| | | ESVTEQDSKDSTYSLSSTLTLSKADYEKHKVYACEVTHQG |
| | | LSSPVTKSFNRGEC |
| 1522 | VH W33D S55D S57D | SYDMH |
| | I58V (79BJN)_HCDR1 | |
| 1523 | VH W33D S55D S57D | RIDPQDGDVKYAQKFQG |
| | I58V (79BJN)_HCDR2 | |
| 1524 | VH W33D S55D S57D | WDYGGYFDV |
| | I58V (79BJN HCDR3 | |
| 1525 | VH W33D S55D S57D | EVQLVQSGAEVKKPGASVKVSCKASGYTFTSYDMHWVRQA |
| | I58V (79BJN)_VH | PGQGLEWMGRIDPQDGDVKYAQKFQGRATLTVDTSTSTAY |
| | | MELSRLRSDDTAVYYCARWDYGGYFDVWGQGTLVTVSS |
| 1526 | VH W33D S55D S57D | EVQLVQSGAEVKKPGASVKVSCKASGYTFTSYDMHWVRQA |
| | I58V (79BJN)_Fab_HC | PGQGLEWMGRIDPQDGDVKYAQKFQGRATLTVDTSTSTAY |
| | | MELSRLRSDDTAVYYCARWDYGGYFDVWGQGTLVTVSSAS |
| | | TKGPSVFPLAPSSKSTSGGTAALGCLVKDYFPEPVTVSWN |
| | | SGALTSGVHTFPAVLQSSGLYSLSSVVTVPSSSLGTQTYI |
| | | CNVNHKPSNTKVDKKVEPKSCDKTHT |
| 1527 | VL T30Y R53G T93E | RASQDIYNYLN |
| | (79BJN)_LCDR1 | |
| 1528 | VL T30Y R53G T93E | YTSGLHS |
| | (79BJN)_LCDR2 | |
| 1529 | VL T30Y R53G T93E | QQGDELPWT |
| | (79BJN)_LCDR3 | |
| 1530 | VL T30Y R53G T93E | DIQMTQSPSSLSASVGDRVTITCRASQDIYNYLNWYQQKP |
| | (79BJN)_VL | GKAVKLLIYYTSGLHSGVPSRFSGSGSGTDYTLTISSLQP |
| | | EDFATYFCQQGDELPWTFGQGTKLEIK |
| 1531 | VL T30Y R53G T93E | DIQMTQSPSSLSASVGDRVTITCRASQDIYNYLNWYQQKP |
| | (79BJN)_LC | GKAVKLLIYYTSGLHSGVPSRFSGSGSGTDYTLTISSLQP |
| | | EDFATYFCQQGDELPWTFGQGTKLEIKRTVAAPSVFIFPP |
| | | SDEQLKSGTASVVCLLNNFYPREAKVQWKVDNALQSGNSQ |
| | | ESVTEQDSKDSTYSLSSTLTLSKADYEKHKVYACEVTHQG |
| | | LSSPVTKSENRGEC |
| 1532 | VH W33D K59R Y104Q | SYDMH |
| | (80BJN)_HCDR1 | |
| 1533 | VH W33D K59R Y104Q | RIDPQSGGIRYAQKFQG |
| | (80BJN)_HCDR2 | |
| 1534 | VH W33D K59R Y104Q | WDYGGQFDV |
| | (80BJN)_HCDR3 | |
| 1535 | VH W33D K59R Y104Q | EVQLVQSGAEVKKPGASVKVSCKASGYTFTSYDMHWVRQA |
| | (80BJN)_VH | PGQGLEWMGRIDPQSGGIRYAQKFQGRATLTVDTSTSTAY |
| | | MELSRLRSDDTAVYYCARWDYGGQFDVWGQGTLVTVSS |
| 1536 | VH W33D K59R Y104Q | EVOLVQSGAEVKKPGASVKVSCKASGYTFTSYDMHWVRQA |
| | (80BJN)_Fab_HC | PGQGLEWMGRIDPQSGGIRYAQKFQGRATLTVDTSTSTAY |
| | | MELSRLRSDDTAVYYCARWDYGGQFDVWGQGTLVTVSSAS |
| | | TKGPSVFPLAPSSKSTSGGTAALGCLVKDYFPEPVTVSWN |
| | | SGALTSGVHTFPAVLQSSGLYSLSSVVTVPSSSLGTQTYI |
| | | CNVNHKPSNTKVDKKVEPKSCDKTHT |
| 1537 | VL T30Y R53I | RASQDIYNYLN |
| | (80BJN)_LCDR1 | |
| 1538 | VL T30Y R53I | YTSILHS |
| | (80BJN)_LCDR2 | |
| 1539 | VL T30Y R53I | QQGDTLPWT |
| | (80BJN)_LCDR3 | |
| 1540 | VL T30Y R53I | DIQMTQSPSSLSASVGDRVTITCRASQDIYNYLNWYQQKP |
| | (80BJN)_VL | GKAVKLLIYYTSILHSGVPSRESGSGSGTDYTLTISSLQP |
| | | EDFATYFCQQGDTLPWTFGQGTKLEIK |
| 1541 | VL T30Y R53I | DIQMTQSPSSLSASVGDRVTITCRASQDIYNYLNWYQQKP |
| | (80BJN)_LC | GKAVKLLIYYTSILHSGVPSRESGSGSGTDYTLTISSLQP |
| | | EDFATYFCQQGDTLPWTFGQGTKLEIKRTVAAPSVFIFPP |
| | | SDEQLKSGTASVVCLLNNFYPREAKVQWKVDNALQSGNSQ |
| | | ESVTEQDSKDSTYSLSSTLTLSKADYEKHKVYACEVTHQG |
| | | LSSPVTKSENRGEC |
| 1542 | VH S31E W33D K59R | EYDMH |
| | Y104Q V107A | |
| | (81BJN)_HCDR1 | |
| 1543 | VH S31E W33D K59R | RIDPQSGGIRYAQKFQG |
| | Y104Q V107A | |
| | (81BJN)_HCDR2 | |
| 1544 | VH S31E W33D K59R | WDYGGQFDA |
| | Y104Q V107A | |
| | (81BJN)_HCDR3 | |
| 1545 | VH S31E W33D K59R | EVOLVQSGAEVKKPGASVKVSCKASGYTFTEYDMHWVRQA |
| | Y104Q V107A | PGQGLEWMGRIDPQSGGIRYAQKFQGRATLTVDTSTSTAY |
| | (81BJN)_VH | MELSRLRSDDTAVYYCARWDYGGQFDAWGQGTLVTVSS |
| 1546 | VH S31E W33D K59R | EVQLVQSGAEVKKPGASVKVSCKASGYTFTEYDMHWVRQA |
| | Y104Q V107A | PGQGLEWMGRIDPQSGGIRYAQKFQGRATLTVDTSTSTAY |
| | (81BJN)_Fab_HC | MELSRLRSDDTAVYYCARWDYGGQFDAWGQGTLVTVSSAS |
| | | TKGPSVFPLAPSSKSTSGGTAALGCLVKDYFPEPVTVSWN |
| | | SGALTSGVHTFPAVLQSSGLYSLSSVVTVPSSSLGTQTYI |
| | | CNVNHKPSNTKVDKKVEPKSCDKTHT |
| 1547 | VL T30Y R53V | RASQDIYNYLN |
| | (81BJN)_LCDR1 | |
| 1548 | VL T30Y R53V | YTSVLHS |
| | (81BJN)_LCDR2 | |
| 1549 | VL T30Y R53V | QQGDTLPWT |
| | (81BJN)_LCDR3 | |
| 1550 | VL T30Y R53V | DIQMTQSPSSLSASVGDRVTITCRASQDIYNYLNWYQQKP |
| | (81BJN)_VL | GKAVKLLIYYTSVLHSGVPSRESGSGSGTDYTLTISSLQP |
| | | EDFATYFCQQGDTLPWTFGQGTKLEIK |
| 1551 | VL T30Y R53V | DIQMTQSPSSLSASVGDRVTITCRASQDIYNYLNWYQQKP |
| | (81BJN)_LC | GKAVKLLIYYTSVLHSGVPSRFSGSGSGTDYTLTISSLQP |
| | | EDFATYFCQQGDTLPWTFGQGTKLEIKRTVAAPSVFIFPP |
| | | SDEQLKSGTASVVCLLNNFYPREAKVQWKVDNALQSGNSQ |
| | | ESVTEQDSKDSTYSLSSTLTLSKADYEKHKVYACEVTHQG |
| | | LSSPVTKSFNRGEC |
| 1552 | VH W33Y H35N 158V | SYYMN |
| | D100H Y104Q | |
| | (82BJN)_HCDR1 | |
| 1553 | VH W33Y H35N I58V | RIDPQSGGVKYAQKFQG |
| | D100H Y104Q | |
| | (82BJN)_HCDR2 | |
| 1554 | VH W33Y H35N I58V | WHYGGQFDV |
| | D100H Y104Q | |
| | (82BJN)_HCDR3 | |
| 1555 | VH W33Y H35N I58V | EVQLVQSGAEVKKPGASVKVSCKASGYTFTSYYMNWVRQA |
| | D100H Y104Q | PGQGLEWMGRIDPQSGGVKYAQKFQGRATLTVDTSTSTAY |
| | (82BJN)_VH | MELSRLRSDDTAVYYCARWHYGGQFDVWGQGTLVTVSS |
| 1556 | VH W33Y H35N I58V | EVQLVQSGAEVKKPGASVKVSCKASGYTFTSYYMNWVRQA |
| | D100H Y104Q | PGQGLEWMGRIDPQSGGVKYAQKFQGRATLTVDTSTSTAY |
| | (82BJN)_Fab_HC | MELSRLRSDDTAVYYCARWHYGGQFDVWGQGTLVTVSSAS |
| | | TKGPSVFPLAPSSKSTSGGTAALGCLVKDYFPEPVTVSWN |
| | | SGALTSGVHTFPAVLQSSGLYSLSSVVTVPSSSLGTQTYI |
| | | CNVNHKPSNTKVDKKVEPKSCDKTHT |
| 1557 | VL T30Y R53G | RASQDIYNYLN |
| | (82BJN)_LCDR1 | |
| 1558 | VL T30Y R53G | YTSGLHS |
| | (82BJN)_LCDR2 | |
| 1559 | VL T30Y R53G | QQGDTLPWT |
| | (82BJN)_LCDR3 | |
| 1560 | VL T30Y R53G | DIQMTQSPSSLSASVGDRVTITCRASQDIYNYLNWYQQKP |
| | (82BJN)_VL | GKAVKLLIYYTSGLHSGVPSRESGSGSGTDYTLTISSLQP |
| | | EDFATYFCQQGDTLPWTFGQGTKLEIK |
| 1561 | VL T30Y R53G | DIQMTQSPSSLSASVGDRVTITCRASQDIYNYLNWYQQKP |
| | (82BJN)_LC | GKAVKLLIYYTSGLHSGVPSRFSGSGSGTDYTLTISSLQP |
| | | EDFATYFCQQGDTLPWTFGQGTKLEIKRTVAAPSVFIFPP |
| | | SDEQLKSGTASVVCLLNNFYPREAKVQWKVDNALQSGNSQ |
| | | ESVTEQDSKDSTYSLSSTLTLSKADYEKHKVYACEVTHQG |
| | | LSSPVTKSENRGEC |

TABLE 43
CDR sequences of 20E6 variants isolated from yeast display selection

| 55BJN | Kabat numbering scheme | | |
|---|---|---|---|
| V-region ID | CDR1 | CDR2 | CDR3 |
| VH W33D M34I | SYDIH | RIDPQSGGIKYAQKFQG | WDYGGYFDV |
| (55BJN) | (SEQ ID NO: | (SEQ ID NO: 1566) | (SEQ ID NO: |
| | 1565) | | 1567) |
| VL (55BJN) | RASQDITNYLN | YTSRLHS | QQGDTLPWT |
| | (SEQ ID NO: | (SEQ ID NO: 1569) | (SEQ ID NO: |
| | 1568) | | 1570) |
| | Chothia numbering scheme | | |
| | CDR1 | CDR2 | CDR3 |
| VH W33D M34I | GYTFTSY | DPQSGG | WDYGGYFDV |
| (55BJN) | (SEQ ID NO: | (SEQ ID NO: 1572) | (SEQ ID NO: |
| | 1571) | | 1573) |
| VL (55BJN) | RASQDITNYLN | YTSRLHS | QQGDTLPWT |
| | (SEQ ID NO: | (SEQ ID NO: 1575) | (SEQ ID NO: |
| | 1574) | | 1576) |
| | ABM numbering scheme | | |
| | CDR1 | CDR2 | CDR3 |
| VH W33D M34I | GYTFTSYDIH | RIDPQSGGIK | WDYGGYFDV |
| (55BJN) | (SEQ ID NO: | (SEQ ID NO: 1578) | (SEQ ID NO: |
| | 1577) | | 1579) |
| VL (55BJN) | RASQDITNYLN | YTSRLHS | QQGDTLPWT |
| | (SEQ ID NO: | (SEQ ID NO: 1581) | (SEQ ID NO: |
| | 1580) | | 1582) |
| | IMGT numbering scheme | | |
| | CDR1 | CDR2 | CDR3 |
| VH W33D M34I | GYTFTSYD | IDPQSGGI | ARWDYGGYFDV |
| (55BJN) | (SEQ ID NO: | (SEQ ID NO: 1584) | (SEQ ID NO: |
| | 1583) | | 1585) |
| VL (55BJN) | QDITNY | YTS | QQGDTLPWT |
| | (SEQ ID NO: | (SEQ ID NO: 1587) | (SEQ ID NO: |
| | 1586) | | 1588) |
| 56BJN | Kabat numbering scheme | | |
| V-region ID | CDR1 | CDR2 | CDR3 |
| VH W33D M34I | SYDIH | RIDPYSGGIKYAQKFQG | WDYGGYFDV |
| Q54Y (56BJN) | (SEQ ID NO: | (SEQ ID NO: 1590) | (SEQ ID NO: |
| | 1589) | | 1591) |
| VL (56BJN)_VL | RASQDITNYLN | YTSRLHS | QQGDTLPWT |
| | (SEQ ID NO: | (SEQ ID NO: 1593) | (SEQ ID NO: |
| | 1592) | | 1594) |
| | Chothia numbering scheme | | |
| | CDR1 | CDR2 | CDR3 |
| VH W33D M34I | GYTFTSY | DPYSGG | WDYGGYFDV |
| Q54Y (56BJN) | (SEQ ID NO: | (SEQ ID NO: 1596) | (SEQ ID NO: |
| | 1595) | | 1597) |
| VL (56BJN)_VL | RASQDITNYLN | YTSRLHS | QQGDTLPWT |
| | (SEQ ID NO: | (SEQ ID NO: 1599) | (SEQ ID NO: |
| | 1598) | | 1600) |
| | ABM numbering scheme | | |
| | CDR1 | CDR2 | CDR3 |
| VH W33D M34I | GYTFTSYDIH | RIDPYSGGIK | WDYGGYFDV |
| Q54Y (56BJN) | (SEQ ID NO: | (SEQ ID NO: 1602) | (SEQ ID NO: |
| | 1601) | | 1603) |
| VL (56BJN)_VL | RASQDITNYLN | YTSRLHS | QQGDTLPWT |
| | (SEQ ID NO: | (SEQ ID NO: 1605) | (SEQ ID NO: |
| | 1604) | | 1606) |
| | IMGT numbering scheme | | |
| | CDR1 | CDR2 | CDR3 |
| VH W33D M34I | GYTFTSYD | IDPYSGGI | ARWDYGGYFDV |
| Q54Y (56BJN) | (SEQ ID NO: | (SEQ ID NO: | (SEQ ID NO: |
| | 1607) | 1608) | 1609) |
| VL (56BJN)_VL | QDITNY | YTS | QQGDTLPWT |
| | (SEQ ID NO: | (SEQ ID NO: 1611) | (SEQ ID NO: |
| | 1610) | | 1612) |
| 57BJN | Kabat numbering scheme | | |
| V-region ID | CDR1 | CDR2 | CDR3 |
| VH W33D | SYDMH | RIDPQSGGIKYAQKFQG | WDYGGYFDV |
| (57BJN) | (SEQ ID NO: | (SEQ ID NO: 1614) | (SEQ ID NO: |
| | 1613) | | 1615) |
| VL (57BJN) | RASQDITNYLN | YTSRLHS | QQGDTLPWT |
| | (SEQ ID NO: | (SEQ ID NO: 1617) | (SEQ ID NO: |
| | 1616) | | 1618) |
| | Chothia numbering scheme | | |
| | CDR1 | CDR2 | CDR3 |
| VH W33D | GYTFTSY | DPQSGG | WDYGGYFDV |
| (57BJN) | (SEQ ID NO: | (SEQ ID NO: 1620) | (SEQ ID NO: |
| | 1619) | | 1621) |
| VL (57BJN) | RASQDITNYLN | YTSRLHS | QQGDTLPWT |
| | (SEQ ID NO: | (SEQ ID NO: 1623) | (SEQ ID NO: |
| | 1622) | | 1624) |
| | ABM numbering scheme | | |
| | CDR1 | CDR2 | CDR3 |
| VH W33D | GYTFTSYDMH | RIDPQSGGIK | WDYGGYFDV |
| (57BJN) | (SEQ ID NO: | (SEQ ID NO: 1626) | (SEQ ID NO: |
| | 1625) | | 1627) |
| VL (57BJN) | RASQDITNYLN | YTSRLHS | QQGDTLPWT |
| | (SEQ ID NO: | (SEQ ID NO: 1629) | (SEQ ID NO: |
| | 1628) | | 1630) |
| | IMGT numbering scheme | | |
| | CDR1 | CDR2 | CDR3 |
| VH W33D | GYTFTSYD | IDPQSGGI | ARWDYGGYFDV |
| (57BJN) | (SEQ ID NO: | (SEQ ID NO: 1632) | (SEQ ID NO: |
| | 1631) | | 1633) |
| VL (57BJN) | QDITNY | YTS | QQGDTLPWT |
| | (SEQ ID NO: | (SEQ ID NO: 1635) | (SEQ ID NO: |
| | 1634) | | 1636) |
| 58BJN | Kabat numbering scheme | | |
| V-region ID | CDR1 | CDR2 | CDR3 |
| VH W33D W99Y | SYDMH | RIDPQSGGIKYAQKFQG | YDHGGYFDV |
| Y101H (58BJN) | (SEQ ID NO: | (SEQ ID NO: 1638) | (SEQ ID NO: |
| | 1637) | | 1639) |
| VL T30Y | RASQDIYNYLN | YTSRLHS | QQGDTLPWT |
| (58BJN) | (SEQ ID NO: | (SEQ ID NO: 1641) | (SEQ ID NO: |
| | 1640) | | 1642) |
| | Chothia numbering scheme | | |
| | CDR1 | CDR2 | CDR3 |
| VH W33D W99Y | GYTFTSY | DPQSGG | YDHGGYFDV |
| Y101H (58BJN) | (SEQ ID NO: | (SEQ ID NO: 1644) | (SEQ ID NO: |
| | 1643) | | 1645) |
| VL T30Y | RASQDIYNYLN | YTSRLHS | QQGDTLPWT |
| (58BJN) | (SEQ ID NO: | (SEQ ID NO: 1647) | (SEQ ID NO: |
| | 1646) | | 1648) |
| | ABM numbering scheme | | |
| | CDR1 | CDR2 | CDR3 |
| VH W33D W99Y | GYTFTSYDMH | RIDPQSGGIK | YDHGGYFDV |
| Y101H (58BJN) | (SEQ ID NO: | (SEQ ID NO: 1650) | (SEQ ID NO: |
| | 1649) | | 1651) |
| VL T30Y | RASQDIYNYLN | YTSRLHS | QQGDTLPWT |
| (58BJN) | (SEQ ID NO: | (SEQ ID NO: 1653) | (SEQ ID NO: |
| | 1652) | | 1654) |
| | IMGT numbering scheme | | |
| | CDR1 | CDR2 | CDR3 |
| VH W33D W99Y | GYTFTSYD | IDPQSGGI | ARYDHGGYFDV |
| Y101H (58BJN) | (SEQ ID NO: | (SEQ ID NO: 1656) | (SEQ ID NO: |
| | 1655) | | 1657) |
| VL T30Y | QDIYNY | YTS | QQGDTLPWT |
| (58BJN) | | (SEQ ID NO: 1659) | |
| | (SEQ ID NO: | | (SEQ ID NO: |
| | 1658) | | 1660) |
| 59BJN | Kabat numbering scheme | | |
| V-region ID | CDR1 | CDR2 | CDR3 |
| VH W33Q M34V | SYQVH | RIDPQSGGIKYAQKFQG | DYGGYFDV |
| (59BJN) | (SEQ ID NO: | (SEQ ID NO: 1662) | (SEQ ID NO: |
| | 1661) | | 1663) |
| VL T30Y | RASQDIYNYLN | YTSRLHS | QQGDTLPWT |
| (59BJN) | (SEQ ID NO: | (SEQ ID NO: 1665) | (SEQ ID NO: |
| | 1664) | | 1666) |
| | Chothia numbering scheme | | |
| | CDR1 | CDR2 | CDR3 |
| VH W33Q M34V | GYTFTSY | DPQSGG | DYGGYFDV |
| (59BJN) | (SEQ ID NO: | (SEQ ID NO: 1668) | (SEQ ID NO: |
| | 1667) | | 1669) |
| VL T30Y | RASQDIYNYLN | YTSRLHS | QQGDTLPWT |
| (59BJN) | (SEQ ID NO: | (SEQ ID NO: 1671) | (SEQ ID NO: |
| | 1670) | | 1672) |
| | ABM numbering scheme | | |
| | CDR1 | CDR2 | CDR3 |
| VH W33Q M34V | GYTFTSYQVH | RIDPQSGGIK | DYGGYFDV |
| (59BJN) | (SEQ ID NO: | (SEQ ID NO: 1674) | (SEQ ID NO: |
| | 1673) | | 1675) |
| VL T30Y | RASQDIYNYLN | YTSRLHS | QQGDTLPWT |
| (59BJN) | (SEQ ID NO: | (SEQ ID NO: 1677) | (SEQ ID NO: |
| | 1676) | | 1678) |
| | IMGT numbering scheme | | |
| | CDR1 | CDR2 | CDR3 |
| VH W33Q M34V | GYTFTSYQ | IDPQSGGI | ARDYGGYFDV |
| (59BJN) | (SEQ ID NO: | (SEQ ID NO: 1680) | (SEQ ID NO: |
| | 1679) | | 1681) |
| VL T30Y | QDIYNY | YTS | QQGDTLPWT |
| (59BJN) | (SEQ ID NO: | (SEQ ID NO: 1683) | (SEQ ID NO: |
| | 1682) | | 1684) |
| 60BJN | Kabat numbering scheme | | |
| V-region ID | CDR1 | CDR2 | CDR3 |
| VH W33D I58E | SYDMH | RIDPQSGGEKYAQKFQG | YDYGGYFDV |
| W99Y (60BJN) | (SEQ ID NO: | (SEQ ID NO: 1686) | (SEQ ID NO: |
| | 1685) | | 1687) |
| VL T30Y | RASQDIYNYLN | YTSRLHS | QQGDTLPWT |
| (60BJN) | (SEQ ID NO: | (SEQ ID NO: 1689) | (SEQ ID NO: |
| | 1688) | | 1690) |
| | Chothia numbering scheme | | |
| | CDR1 | CDR2 | CDR3 |
| VH W33D I58E | GYTFTSY | DPQSGG | YDYGGYFDV |
| W99Y (60BJN) | (SEQ ID NO: | (SEQ ID NO: 1692) | (SEQ ID NO: |
| | 1691) | YTSRLHS | 1693) |
| VL T30Y | RASQDIYNYLN | (SEQ ID NO: 1695) | QQGDTLPWT |
| (60BJN) | (SEQ ID NO: | | (SEQ ID NO: |
| | 1694) | | 1696) |
| | ABM numbering scheme | | |
| | CDR1 | CDR2 | CDR3 |
| VH W33D I58E | GYTFTSYDMH | RIDPQSGGEK | YDYGGYFDV |
| W99Y (60BJN) | (SEQ ID NO: | (SEQ ID NO: 1698) | (SEQ ID NO: |
| | 1697) | | 1699) |
| VL T30Y | RASQDIYNYLN | YTSRLHS | QQGDTLPWT |
| (60BJN) | (SEQ ID NO: | (SEQ ID NO: 1701) | (SEQ ID NO: |
| | 1700) | | 1702) |
| | IMGT numbering scheme | | |
| | CDR1 | CDR2 | CDR3 |
| VH W33D I58E | GYTFTSYD | IDPQSGGE | ARYDYGGYFDV |
| W99Y (60BJN) | (SEQ ID NO: | (SEQ ID NO: 1704) | (SEQ ID NO: |
| | 1703) | | 1705) |
| VL T30Y | QDIYNY | YTS | QQGDTLPWT |
| (60BJN) | (SEQ ID NO: | (SEQ ID NO: 1707) | (SEQ ID NO: |
| | 1706) | | 1708) |
| 61BJN | Kabat numbering scheme | | |
| V-region ID | CDR1 | CDR2 | CDR3 |
| VH S31D W33D | DYDMH | RIDPQSGDHDYAQKFQG | YDHGGYFDV |
| G57D I58H | (SEQ ID NO: | (SEQ ID NO: 1710) | (SEQ ID NO: |
| K59D W99Y | 1709) | | 1711) |
| Y101H (61BJN) | | | |
| VL T30Y | RASQDIYNYLN | YTSRLHS | QQGDTLPWT |
| (61BJN) | (SEQ ID NO: | (SEQ ID NO: 1713) | (SEQ ID NO: |
| | 1712) | | 1714) |
| | Chothia numbering scheme | | |
| | CDR1 | CDR2 | CDR3 |
| VH S31D W33D | GYTFTDY | DPQSGD | GYTFTDY |
| G57D I58H | (SEQ ID NO: | (SEQ ID NO: 1716) | (SEQ ID NO: |
| K59D W99Y | 1715) | | 1715) |
| Y101H (61BJN) | | | |
| VL T30Y | RASQDIYNYLN | YTSRLHS | QQGDTLPWT |
| (61BJN) | (SEQ ID NO: | (SEQ ID NO: 1719) | (SEQ ID NO: |
| | 1718) | | 1720) |
| | ABM numbering scheme | | |
| | CDR1 | CDR2 | CDR3 |
| VH S31D W33D | GYTFTDYDMH | RIDPQSGDHD | YDHGGYFDV |
| G57D I58H | (SEQ ID NO: | (SEQ ID NO: 1722) | (SEQ ID NO: |
| | 1721) | | 1723) |
| VL T30Y | RASQDIYNYLN | YTSRLHS | QQGDTLPWT |
| (61BJN) | (SEQ ID NO: | (SEQ ID NO: 1725) | (SEQ ID NO: |
| K59D W99Y | 1724) | | 1726) |
| Y101H (61BJN) | | | |
| | IMGT numbering scheme | | |
| | CDR1 | CDR2 | CDR3 |
| VH S31D W33D | GYTFTDYD | IDPQSGDH | ARYDHGGYFDV |
| G57D I58H | (SEQ ID NO: | (SEQ ID NO: 1728) | (SEQ ID NO: |
| K59D W99Y | 1727) | | 1729) |
| Y101H (61BJN) | | | |
| VL T30Y | QDIYNY | YTS | QQGDTLPWT |
| (61BJN) | (SEQ ID NO: | (SEQ ID NO: 1731) | (SEQ ID NO: |
| | 1730) | | 1732) |
| 62BJN | Kabat numbering scheme | | |
| V-region ID | CDR1 | CDR2 | CDR3 |
| VH W33D Q54Y | SYDMH | RIDPYGGGIKYAQKFQG | YDHGGYFDV |
| S55G W99Y | (SEQ ID NO: | (SEQ ID NO: 1734) | (SEQ ID NO: |
| Y101H (62BJN) | 1733) | | 1735) |
| VL T30Y | RASQDIYNYLN | YTSRLHS | QQGDTLPWT |
| (62BJN) | (SEQ ID NO: | (SEQ ID NO: 1737) | (SEQ ID NO: |
| | 1736) | | 1738) |
| | Chothia numbering scheme | | |
| | CDR1 | CDR2 | CDR3 |
| VH W33D Q54Y | GYTFTSY | DPYGGG | YDHGGYFDV |
| S55G W99Y | (SEQ ID NO: | (SEQ ID NO: 1740) | (SEQ ID NO: |
| Y101H (62BJN) | 1739) | | 1741) |
| VL T30Y | RASQDIYNYLN | YTSRLHS | QQGDTLPWT |
| (62BJN) | (SEQ ID NO: | (SEQ ID NO: 1743) | (SEQ ID NO: |
| | 1742) | | 1744) |
| | ABM numbering scheme | | |
| | CDR1 | CDR2 | CDR3 |
| VH W33D Q54Y | GYTFTSYDMH | RIDPYGGGIK | YDHGGYFDV |
| S55G W99Y | (SEQ ID NO: | (SEQ ID NO: 1746) | (SEQ ID NO: |
| Y101H (62BJN) | 1745) | | 1747) |
| VL T30Y | RASQDIYNYLN | YTSRLHS | QQGDTLPWT |
| (62BJN) | (SEQ ID NO: | (SEQ ID NO: 1749) | (SEQ ID NO: |
| | 1748) | | 1750) |
| | IMGT numbering scheme | | |
| | CDR1 | CDR2 | CDR3 |
| VH W33D Q54Y | GYTFTSYD | IDPYGGGI | ARYDHGGYFDV |
| S55G W99Y | (SEQ ID NO: | (SEQ ID NO: 1752) | (SEQ ID NO: |
| Y101H (62BJN) | 1751) | | 1753) |
| VL T30Y | QDIYNY | YTS | QQGDTLPWT |
| (62BJN) | | (SEQ ID NO: 1755) | |
| | (SEQ ID NO: | | (SEQ ID NO: |
| | 1754) | | 1756) |
| 63BJN | Kabat numbering scheme | | |
| V-region ID | CDR1 | CDR2 | CDR3 |
| VH S31F W33D | FYDIH | RIDPQSGGIKYAQKFQG | WDYGGYFDV |
| M34I (63BJN) | (SEQ ID NO: | (SEQ ID NO: 1758) | (SEQ ID NO: |
| | 1757) | | 1759) |
| VL T30Y | RASQDIYNYLN | YTSRLHS | QQGDTLPWT |
| (63BJN) | (SEQ ID NO: | (SEQ ID NO: 1761) | (SEQ ID NO: |
| | 1760) | | 1762) |
| | Chothia numbering scheme | | |
| | CDR1 | CDR2 | CDR3 (*) |
| VH S31F W33D | GYTFTFY | DPQSGG | WDYGGYFDV |
| M34I (63BJN) | (SEQ ID NO: | (SEQ ID NO: 1764) | (SEQ ID NO: |
| | 1763) | | 1765) |
| VL T30Y | RASQDIYNYLN | YTSRLHS | QQGDTLPWT |
| (63BJN) | (SEQ ID NO: | (SEQ ID NO: 1767) | (SEQ ID NO: |
| | 1766) | | 1768) |
| | ABM numbering scheme | | |
| | CDR1 | CDR2 | CDR3 |
| VH S31F W33D | GYTFTFYDIH | RIDPQSGGIK | WDYGGYFDV |
| M34I (63BJN) | (SEQ ID NO: | (SEQ ID NO: 1770) | (SEQ ID NO: |
| | 1769) | | 1771) |
| VL T30Y | RASQDIYNYLN | YTSRLHS | QQGDTLPWT |
| (63BJN) | (SEQ ID NO: | (SEQ ID NO: 1773) | (SEQ ID NO: |
| | 1772) | | 1774) |
| | IMGT numbering scheme | | |
| | CDR1 | CDR2 | CDR3 |
| VH S31F W33D | GYTFTFYD | IDPQSGGI | ARWDYGGYFDV |
| M34I (63BJN) | (SEQ ID NO: | (SEQ ID NO: 1776) | (SEQ ID NO: |
| | 1775) | | 1777) |
| VL T30Y | QDIYNY | YTS | QQGDTLPWT |
| (63BJN) | (SEQ ID NO: | (SEQ ID NO: 1779) | (SEQ ID NO: |
| | 1778) | | 1780) |
| 64BJN | Kabat numbering scheme | | |
| V-region ID | CDR1 | CDR2 | CDR3 |
| VH S31T I58S | TYWMH | RIDPQSGGSKYAQKFQG | WDYGGYFDV |
| (64BJN) | (SEQ ID NO: | (SEQ ID NO: 1782) | (SEQ ID NO: |
| | 1781) | | 1783) |
| VL T30Y R53H | RASQDIYNYLN | YTSHLHS | QQGDTLPWT |
| (64BJN) | (SEQ ID NO: | (SEQ ID NO: 1785) | (SEQ ID NO: |
| | 1784) | | 1786) |
| | Chothia numbering scheme | | |
| | CDR1 | CDR2 | CDR3 |
| VH S31T I58S | GYTFTTY | DPQSGG | WDYGGYFDV |
| (64BJN) | (SEQ ID NO: | (SEQ ID NO: 1788) | (SEQ ID NO: |
| | 1787) | | 1789) |
| VL T30Y R53H | RASQDIYNYLN | YTSHLHS | QQGDTLPWT |
| (64BJN) | (SEQ ID NO: | (SEQ ID NO: 1791) | (SEQ ID NO: |
| | 1790) | | 1792) |
| | ABM numbering scheme | | |
| | CDR1 | CDR2 | CDR3 |
| VH S31T I58S | GYTFTTYWMH | RIDPQSGGSK | WDYGGYFDV |
| (64BJN) | (SEQ ID NO: | (SEQ ID NO: 1794) | (SEQ ID NO: |
| | 1793) | | 1795) |
| VL T30Y R53H | RASQDIYNYLN | YTSHLHS | QQGDTLPWT |
| (64BJN) | (SEQ ID NO: | (SEQ ID NO: 1797) | (SEQ ID NO: |
| | 1796) | | 1798) |
| | IMGT numbering scheme | | |
| | CDR1 | CDR2 | CDR3 |
| VH S3IT I58S | GYTFTTYW | IDPQSGGS | AJWDYGGYFDV |
| (64BJN) | (SEQ ID NO: | (SEQ ID NO: 1800) | (SEQ ID NO: |
| | 1799) | | 1801) |
| VL T30Y R53H | QDIYNY | YTS | QQGDTLPWT |
| (64BJN) | (SEQ ID NO: | (SEQ ID NO: 1803) | (SEQ ID NO: |
| | 1802) | | 1804) |
| 65BJN | Kabat numbering scheme | | |
| V-region ID | CDR1 | CDR2 | CDR3 |
| VH W33D M34L | SYDLH | RIDPQSGGIKYAQKFQG | YDQGGYFDV |
| W99Y Y101Q | (SEQ ID NO: | (SEQ ID NO: 1806) | (SEQ ID MO: |
| (65BJN) | 1805) | | 1807) |
| VL T30Y N31Y | RASQDIYYYLN | YTSRLHS | QQGDTLPWT |
| (65BJN) | (SEQ ID NO: | (SEQ ID NO: 1809) | (SEQ ID NO: |
| | 1808) | | 1810) |
| | Chothia numbering scheme | | |
| | CDR1 | CDR2 | CDR3 |
| VH W33D M34L | GYTFTSY | DPQSGG | YDQGGYFDV |
| W99Y Y101Q | (SEQ ID NO: | (SEQ ID NO: 1812) | (SEQ ID NO: |
| (65BJN) | 1811) | | 1813) |
| VL T30Y N31Y | RASQDIYYYLN | YTSRLHS | QQGDTLPWT |
| (65BJN) | (SEQ ID NO: | (SEQ ID NO: 1815) | (SEQ ID NO: |
| | 1814) | | 1816) |
| | ABM numbering scheme | | |
| | CDR1 | CDR2 | CDR3 |
| VH W33D M34L | GYTFTSYDLH | RIDPQSGGIK | YDQGGYFDV |
| W99Y Y101Q | (SEQ ID NO: | (SEQ ID NO: 1818) | (SEQ ID NO: |
| (65BJN) | 1817) | | 1819) |
| VL T30Y N31Y | RASQDIYYYLN | YTSRLHS | QQGDTLPWT |
| (65BJN) | (SEQ ID NO: | (SEQ ID NO: 1821) | (SEQ ID NO: |
| | 1820) | | 1822) |
| | IMGT numbering scheme | | |
| | CDR1 | CDR2 | CDR3 |
| VH W33D M34L | GYTFTSYD | IDPQSGGI | ARYDQGGYFDV |
| W99Y Y101Q | (SEQ ID NO: | (SEQ ID NO: 1824) | (SEQ ID NO: |
| (65BJN) | 1823) | | 1825) |
| VL T30Y N31Y | QDIYYY | YTS | QQGDTLPWT |
| (65BJN) | (SEQ ID NO: | (SEQ ID NO: 1827) | (SEQ ID NO: |
| | 1826) | | 1828) |
| 66BJN | Kabat numbering scheme | | |
| V-region ID | CDR1 | CDR2 | CDR3 |
| VH W33D S55T | SYDMH | RIDPQTGGIKYAQKFQG | WDHGGYFDV |
| Y101H (66BJN) | (SEQ ID NO: | (SEQ ID NO: 1830) | (SEQ ID NO: |
| | 1829) | | 1831) |
| VL T30Y L94Q | RASQDIYNYLN | YTSRLHS | QQGDTQPWT |
| (66BJN) | (SEQ ID NO: | (SEQ ID NO: 1833) | (SEQ ID NO: |
| | 1832) | | 1834) |
| | Chothia numbering scheme | | |
| | CDR1 | CDR2 | CDR3 |
| VH VJ33D S55T | GYTFTSY | DPQTGG | WDHGGYFDV |
| Y101H (66BJN) | (SEQ ID NO: | (SEQ ID NO: 1836) | (SEQ ID NO: |
| | 1835) | | 1837) |
| VL T30Y L94Q | RASQDIYNYLN | YTSRLHS | QQGDTQPWT |
| (66BJN) | (SEQ ID NO: | (SEQ ID NO: 1839) | (SEQ ID NO: |
| | 1838) | | 1840) |
| | ABM numbering scheme | | |
| | CDR1 | CDR2 | CDR3 |
| VH W33D S55T | GYTFTSYDMH | RIDPQTGGIK | WDHGGYFDV |
| Y101H {66BJN) | (SEQ ID NO: | (SEQ ID NO: 1842) | (SEQ ID NO: |
| | 1841) | | 1843) |
| VL T30Y L94Q | RASQDIYNYLN | YTSRLHS | QQGDTQPWT |
| (66BJN) | (SEQ ID NO: | (SEQ ID NO: 1845) | (SEQ ID NO: |
| | 1844) | | 1846) |
| | IMGT numbering scheme | | |
| | CDR1 | CDR2 | CDR3 |
| VH W33D S55T | GYTFTSYD | IDPQTGGI | ARWDHGGYFDV |
| Y101H (66BJN) | (SEQ ID NO: | (SEQ ID NO: 1848) | (SEQ ID NO: |
| | 1847) | | 1849) |
| VL T30Y L94Q | QDIYNY | YTS | QQGDTQPWT |
| (66BJN) | (SEQ ID NO: | (SEQ ID NO: 1851) | (SEQ ID NO: |
| | 1850) | | 1852) |
| 67BJN | Kabat numbering scheme | | |
| V-region ID | CDR1 | CDR2 | CDR3 |
| VH W33D | SYDMH | RIDPQSGGIKYAQKFQG | WDYGGYFDV |
| (67BJN) | (SEQ ID NO: | (SEQ ID NO: 1854) | (SEQ ID NO: |
| | 1853) | | 1855) |
| VL T30Y R53V | RASQDIYNYLN | YTSVLHS | QQGDTLPWT |
| (67BJN) | (SEQ ID NO: | (SEQ ID NO: 1857) | (SEQ ID NO: |
| | 1856) | | 1858) |
| | Chothia numbering scheme | | |
| | CDR1 | CDR2 | CDR3 |
| VH W33D | GYTFTSY | DPQSGG | WDYGGYFDV |
| (67BJN) | (SEQ ID NO: | (SEQ ID NO: 1860) | (SEQ ID NO: |
| | 1859) | | 1861) |
| VL T30Y R53V | RASQDIYNYLN | YTSVLHS | QQGDTLPWT |
| (67BJN) | (SEQ ID NO: | (SEQ ID NO: 1863) | (SEQ ID NO: |
| | 1862) | | 1864) |
| | ABM numbering scheme | | |
| | CDR1 | CDR2 | CDR3 |
| VH W33D | GYTFTSYDMH | RIDPQSGGIK | WDYGGYFDV |
| (67BJN) | (SEQ ID NO: | (SEQ ID NO: 1866) | (SEQ ID NO: |
| | 1865) | | 1867) |
| VL T30Y R53V | RASQDIYNYLN | YTSVLHS | QQGDTLPWT |
| (67BJN) | (SEQ ID NO: | (SEQ ID NO: 1869) | (SEQ ID NO: |
| | 1868) | | 1870) |
| | IMGT numbering scheme | | |
| | CDR1 | CDR2 | CDR3 |
| VH W33D | GYTFTSYD | IDPQSGGI | ARWDYGGYFDV |
| (67BJN) | (SEQ ID NO: | (SEQ ID NO: 1872) | (SEQ ID NO: |
| | 1871) | | 1873) |
| VL T30Y R53V | QDIYNY | YTS | QQGDTLPWT |
| (67BJN) | (SEQ ID NO: | (SEQ ID NO: 1875) | (SEQ ID NO: |
| | 1874) | | 1876) |
| 68BJN | Kabat numbering scheme | | |
| V-region ID | CDR1 | CDR2 | CDR3 |
| VH H35Q S55D | SYWMQ | RIDPQDGDIKYAQKFQG | YDYGGYFDV |
| S57D W99Y | (SEQ ID NO: | (SEQ ID NO: 1878) | (SEQ ID NO: |
| (68BJN) | 1877) | | 1879) |
| VL T30Y R53V | RASQDIYNYLN | YTSVLHS | QQGDTLPWT |
| (68BJN) | (SEQ ID NO: | (SEQ ID NO: 1881) | (SEQ ID NO: |
| | 1880) | | 1882) |
| | Chothia numbering scheme | | |
| | CDR1 | CDR2 | CDR3 |
| VH H35Q S55D | GYTFTSY | DPQDGD | YDYGGYFDV |
| 357D W99Y | (SEQ ID NO: | (SEQ ID NO: 1884) | (SEQ ID NO: |
| (68BJN) | 1883) | | 1885) |
| VL T30Y R53V | RASQDIYNYLN | YTSVLHS | QQGDTLPWT |
| (68BJN) | (SEQ ID NO: 1886) | (SEQ ID NO: 1887) | (SEQ ID NO: 1888) |
| | ABM numbering scheme | | |
| | CDR1 | CDR2 | CDR3 |
| VH H35Q S55D | GYTFTSYWMQ | RIDPQDGDIK | YDYGGYFDV |
| S57D W99Y | (SEQ ID NO: | (SEQ ID NO: 1890) | (SEQ ID NO: |
| (68BJN) | 1889) | | 1891) |
| VL T30Y R53V | RASQDIYNYLN | YTSVLHS | QQGDTLPWT |
| (68BJN) | (SEQ ID NO: | (SEQ ID NO: 1893) | (SEQ ID NO: |
| | 1892) | | 1894) |
| | iMGT numbering scheme | | |
| | CDR1 | CDR2 | CDR3 |
| VH H35Q S55D | GYTFTSYW | IDPQDGDI | ARYDYGGYFDV |
| S57D W99Y | (SEQ ID NO: | (SEQ ID NO: 1896) | (SEQ ID NO: |
| (68BJN) | 1895) | | 1897) |
| VL T30Y R53V | QDIYNY | YTS | QQGDTLPWT |
| (68BJN) | (SEQ ID NO: | (SEQ ID NO: 1899) | (SEQ ID NO: |
| | 1898) | | 1900) |
| 69BJN | Kabat numbering scheme | | |
| V-region ID | CDR1 | CDR2 | CDR3 |
| VH VJ33D I58T | SYDMH | RIDPQSGGTKYAQKFQG | WDYGGYFDV |
| (69BJN) | (SEQ ID NO: | (SEQ ID NO: 1902) | (SEQ ID NO: |
| | 1901) | | 1903) |
| VL T30Y R53V | RASQDIYNYLN | YTSVLHS | QQGDTLPWT |
| (69BJN) | (SEQ ID NO: | (SEQ ID NO: 1905) | (SEQ ID NO: |
| | 1904) | | 1906) |
| | Chothia numbering scheme | | |
| | CDR1 | CDR2 | CDR3 |
| VH W33D I58T | GYTFTSY | DPQSGG | WDYGGYFDV |
| (69BJN) | (SEQ ID NO: | (SEQ ID NO: 1908) | (SEQ ID NO: |
| | 1907) | | 1909) |
| VL T30Y R53V | RASQDIYNYLN | YTSVLHS | QQGDTLPWT |
| (69BJN) | (SEQ ID NO: | (SEQ ID NO: 1911) | (SEQ ID NO: |
| | 1910) | | 1912) |
| | ABM numbering scheme | | |
| | CDR1 | CDR2 | CDR3 |
| VH W33D I58T | GYTFTSYDMH | RIDPQSGGTK | WDYGGYFDV |
| (69BJN) | (SEQ ID NO: | (SEQ ID NO: 1914) | (SEQ ID NO: |
| | 1913) | | 1915) |
| VL T30Y R53V | RASQDIYNYLN | YTSVLHS | QQGDTLPWT |
| (69BJN) | (SEQ ID NO: | (SEQ ID NO: 1917) | (SEQ ID NO: |
| | 1916) | | 1918) |
| | IMGT numbering scheme | | |
| | CDR1 | CDR2 | CDR3 |
| VH W33D I58T | GYTFTSYD | IDPQSGGT | ARWDYGGYFDV |
| (69BJN) | (SEQ ID NO: | (SEQ ID NO: 1920) | (SEQ ID NO: |
| | 1919) | | 1921) |
| VL T30Y R53V | QDIYNY | YTS | QQGDTLPWT |
| (69BJN) | (SEQ ID MO: | (SEQ ID NO: 1923) | (SEQ ID NO: |
| | 1922) | | 1924) |
| 71BJN | Kabat numbering scheme | | |
| V-region ID | CDR1 | CDR2 | CDR3 |
| VH W33D S55T | SYDMH | RIDPQTGDIKYAQKFQG | WDYGGQFDV |
| G57D Y104Q | (SEQ ID NO: | (SEQ ID NO: 1926) | (SEQ ID NO: |
| (71BJN) | 1925) | | 1927) |
| VL T30Y R53G | RASQDIYNYLN | YTSGLHS | QQGDTLPWT |
| (71BJN) | (SEQ ID NO: | (SEQ ID NO: 1929) | (SEQ ID NO: |
| | 1928) | | 1930) |
| | Chothia numbering scheme | | |
| | CDR1 | CDR2 | CDR3 |
| VH W33D S55T | GYTFTSY | DPQTGD | WDYGGQFDV |
| G57D Y104Q | (SEQ ID NO: | (SEQ ID NO: 1932) | (SEQ ID NO: |
| (71BJN) | 1931) | | 1933) |
| VL T30Y R53G | RASQDIYNYLN | YTSGLHS | QQGDTLPWT |
| (71BJN) | (SEQ ID NO: | (SEQ ID NO: 1935) | (SEQ ID NO: |
| | 1934) | | 1936) |
| | ABM numbering scheme | | |
| | CDR1 | CDR2 | CDR3 |
| VH W33D S55T | GYTFTSYDMH | RIDPQTGDIK | WDYGGQFDV |
| G57D Y104Q | (SEQ ID NO: | (SEQ ID NO: 1938) | (SEQ ID NO: |
| (71BJN) | 1937) | | 1939) |
| VL T30Y R53G | RASQDIYNYLN | YTSGLHS | QQGDTLPWT |
| (71BJN) | (SEQ ID NO: | (SEQ ID NO: 1941) | (SEQ ID NO: |
| | 1940) | | 1942) |
| | IMGT numbering scheme | | |
| | CDR1 | CDR2 | CDR3 |
| VH W33D S55T | GYTFTSYD | IDPQTGDI | ARWDYGGQFDV |
| G57D Y104Q | (SEQ ID NO: | (SEQ ID NO: 1944) | (SEQ ID NO: |
| (71BJN) | 1943) | | 1945) |
| VL T30Y R53G | QDIYNY | YTS | QQGDTLPWT |
| (71BJN) | (SEQ ID NO: | (SEQ ID NO: 1947) | (SEQ ID NO: |
| | 1946) | | 1948) |
| 72BJN | Kabat numbering scheme | | |
| V-region ID | CDR1 | CDR2 | CDR3 |
| VH S31Q W33D | QYDMH | RIDPQSGGIKYAQKFQG | YDYGGYFDV |
| W99Y (72BJN} | (SEQ ID NO: | (SEQ ID NO: 1950) | (SEQ ID NO: |
| | 1949) | | 1951) |
| VL T30Y R53I | RASQDIYNYLN | YTSILHS | QQGDTLPWT |
| (72BJN) | (SEQ ID NO: | (SEQ ID NO: 1953) | (SEQ ID NO: |
| | 1952) | | 1954) |
| | Chothia numbering scheme | | |
| | CDR1 | CDR2 | CDR3 |
| VH S31Q W33D | GYTFTQY | DPQSGG | YDYGGYFDV |
| W99Y (72BJN) | (SEQ ID NO: | (SEQ ID NO: 1956) | (SEQ ID NO: |
| | 1955) | | 1957) |
| VL T30Y R53I | RASQDIYNYLN | YTSILHS | QQGDTLPWT |
| (72BJN) | (SEQ ID NO: | (SEQ ID NO: 1959) | (SEQ ID NO: |
| | 1958) | | 1960) |
| | ABM numbering scheme | | |
| | CDR1 | CDR2 | CDR3 |
| VH S31Q W33D | GYTFTQYDMH | RIDPQSGGIK | YDYGGYFDV |
| W99Y (72BJN) | (SEQ ID NO: | (SEQ ID NO: 1962) | (SEQ ID NO: |
| | 1961) | | 1963) |
| VL T30Y R53I | RASQDIYNYLN | YTSILHS | QQGDTLPWT |
| (72BJN) | (SEQ ID NO: | (SEQ ID NO: 1965) | (SEQ ID NO: |
| | 1964) | | 1966) |
| | IMGT numbering scheme | | |
| | CDR1 | CDR2 | CDR3 |
| VH S31Q W33D | GYTFTQYD | IDPQSGGI | ARYDYGGYFDV |
| W99Y (72BJN) | (SEQ ID MO: | (SEQ ID NO: 1968) | (SEQ ID NO: |
| | 1967) | | 1969) |
| VL T30Y R53I | QDIYNY | YTS | QQGDTLPWT |
| (72BJN) | (SEQ ID NO: | (SEQ ID NO: 1971) | (SEQ ID NO: |
| | 1970) | | 1972) |
| 73BJN | Kabat numbering scheme | | |
| V-region ID | CDR1 | CDR2 | CDR3 |
| VH W33D | SYDMH | RIDPQSGGIKYAQKFQG | WDYGGYFDV |
| (73BJN) | (SEQ ID NO: | (SEQ ID NO: 1974) | (SEQ ID NO: |
| | 1973) | | 1975) |
| VL T30Y | RASQDIYNYLN | YTSRLHS | QQGDTLPWT |
| (73BJN) | (SEQ ID NO: | (SEQ ID NO: 1977) | (SEQ ID NO: |
| | 1976) | | 1978) |
| | Chothia numbering scheme | | |
| | CDR1 | CDR2 | CDR3 |
| VH W33D | GYTFTSY | DPQSGG | WDYGGYFDV |
| (73BJN) | (SEQ ID NO: | (SEQ ID NO: 1980) | (SEQ ID NO: |
| | 1979) | | 1981) |
| VL T30Y | RASQDIYNYLN | YTSRLHS | QQGDTLPWT |
| (73BJN) | (SEQ ID NO: | (SEQ ID NO: 1983) | (SEQ ID NO: |
| | 1982) | | 1984) |
| | ABM numbering scheme | | |
| | CDR1 | CDR2 | CDR3 |
| VH W33D | GYTFTSYDMH | RIDPQSGGIK | WDYGGYFDV |
| (73BJN) | (SEQ ID NO: | (SEQ ID NO: 1986) | (SEQ ID NO: |
| | 1985) | | 1987) |
| VL T30Y | RASQDIYNYLN | YTSRLHS | QQGDTLPWT |
| (73BJN) | (SEQ ID NO: | (SEQ ID NO: 1989) | (SEQ ID NO: |
| | 1988) | | 1990) |
| | IMGT numbering scheme | | |
| | CDR1 | CDR2 | CDR3 |
| VH W33D | GYTFTSYD | IDPQSGGI | ARWDYGGYFDV |
| (73BJN) | (SEQ ID NO: | (SEQ ID NO: 1992) | (SEQ ID NO: |
| | 1991) | | 1993) |
| VL T30Y | QDIYNY | YTS | QQGDTLPWT |
| (73BJN) | (SEQ ID NO: | (SEQ ID NO: 1995) | (SEQ ID NO: |
| | 1994) | | 1996) |
| 74BJN | Kabat numbering scheme | | |
| V-region ID | CDR1 | CDR2 | CDR3 |
| VH S31Y W33D | YYDLH | RIDPQSGGIKYAQKFQG | WDYGGYFDV |
| M34L (74BJN) | (SEQ ID NO: | (SEQ ID NO: 1998) | (SEQ ID NO: |
| | 1997) | | 1999) |
| VL T30Y T93D | RASQDIYNYLNW | YTSRLHS | QQGDDIPWTF |
| L94I (74BJN) | (SEQ ID NO: | (SEQ ID NO: 2001) | (SEQ ID NO: |
| | 2000) | | 2002) |
| | Chothia numbering scheme | | |
| | CDR1 | CDR2 | CDR3 |
| VH S31Y W33D | GYTFTYY | DPQSG | WDYGGYFDV |
| M34L (74BJN) | (SEQ ID NO: | (SEQ ID NO: 2004) | (SEQ ID MO: |
| | 2003) | | 2005) |
| VL T30Y T93D | RASQDIYNYLNW | YTSRLHS | QQGDDIPWTF |
| L94I (74BJN) | (SEQ ID NO: | (SEQ ID NO: 2007) | (SEQ ID NO: |
| | 2006) | | 2008) |
| | ABM numbering scheme | | |
| | CDR1 | CDR2 | CDR3 |
| VH S31Y W33D | gytftyydlh | RIDPQSGGIK | WDYGGYFDV |
| M34L (74BJN) | (SEQ ID NO: | (SEQ ID NO: 2010) | (SEQ ID NO: |
| | 2009) | | 2011) |
| VL T30Y T93D | RASQDIYNYLNW | YTSRLHS | QQGDDIPWTF |
| L94I (74BJN) | (SEQ ID NO: | (SEQ ID NO: 2013) | (SEQ ID NO: |
| | 2012) | | 2014) |
| | IMGT numbering scheme | | |
| | CDR1 | CDR2 | CDR3 |
| VH S31Y W33D | GYTFTYYD | IDPQSGGI | ARWDYGGYFDV |
| M34L (74BJN) | (SEQ ID NO: | (SEQ ID NO: 2016) | (SEQ ID NO: |
| | 2015) | | 2017) |
| VL T30Y T93D | QDIYNYL | YTS | QQGDDIPWTF |
| L94I (74BJN) | (SEQ ID NO: | (SEQ ID NO: 2019) | (SEQ ID NO: |
| | 2018) | | 2020) |
| 75BJN | Kabat numbering scheme | | |
| V-region ID | CDR1 | CDR2 | CDR3 |
| VH S31K W33D | KYDMH | RIDPQDGGFKYAQKFQG | WDYGGYFDV |
| S55D I58F | (SEQ ID NO: | (SEQ ID NO: 2022) | (SEQ ID NO: |
| (75BJN) | 2021) | | 2023) |
| VL T30Y R53Y | RASQDIFNYLN | YTSYLHS | QQGDELPWT |
| T93E (75BJN) | (SEQ ID NO: | (SEQ ID NO: 2025) | (SEQ ID NO: |
| | 2024) | | 2026) |
| | Chothia numbering scheme | | |
| | CDR1 | CDR2 | CDR3 |
| VH S31K W33D | GYTFTKY | DPQDGG | WDYGGYFDV |
| S55D I58F | (SEQ ID NO: | (SEQ ID NO: 2028) | (SEQ ID NO: |
| (75BJN) | 2027) | | 2029) |
| VL T30Y R53Y | RASQDIFNYLN | YTSYLHS | QQGDELPWT |
| T93E (75BJN) | (SEQ ID NO: | (SEQ ID NO: 2031) | (SEQ ID NO: |
| | 2030) | | 2032) |
| | ABM numbering scheme | | |
| | CDR1 | CDR2 | CDR3 |
| VH S31K W33D | GYTFTKYDMH | RIDPQDGGFK | WDYGGYFDV |
| S55D I58F | (SEQ ID NO: | (SEQ ID NO: 2034) | (SEQ ID NO: |
| (75BJN) | 2033) | | 2035) |
| VL T30Y R53Y | RASQDIFNYLN | YTSYLHS | QQGDELPWT |
| T93E (75BJN) | (SEQ ID NO: | (SEQ ID NO: 2037) | (SEQ ID NO: |
| | 2036) | | 2038) |
| | IMGT numbering scheme | | |
| | CDR1 | CDR2 | CDR3 |
| VH S31K W33D | GYTFTKYD | IDPQDGGF | ARWDYGGYFDV |
| S55D I58F | (SEQ ID NO: | (SEQ ID NO: 2040) | (SEQ ID MO: |
| (75BJN) | 2039) | | 2041) |
| VL T30Y R53Y | QDIFNY | YTS | QQGDELPWT |
| T93E (75BJN) | (SEQ ID NO: | (SEQ ID NO: 2043) | (SEQ ID NO: |
| | 2042) | | 2044) |
| 76BJN | Kabat numbering scheme | | |
| V-region ID | CDR1 | CDR2 | CDR3 |
| VH S31Y W33D | YYDMH | RIDPYDGDIKYAQKFQG | WDYGGYFDV |
| Q54Y S55D | (SEQ ID NO: | (SEQ ID NO: 2046) | (SEQ ID NO: |
| G57D (76BJN) | 2045) | | 2047) |
| VL T30Y R53L | RASQDIYNYLN | YTSLLHS | QQGDELPWT |
| T93E (76BJN) | (SEQ ID NO: | (SEQ ID NO: 2049) | (SEQ ID NO: |
| | 2048) | | 2050) |
| | Chothia numbering scheme | | |
| | CDR1 | CDR2 | CDR3 |
| VH S31Y W33D | GYTFTYY | DPYDGD | WDYGGYFDV |
| Q54Y S55D | (SEQ ID NO: | (SEQ ID NO: 2052) | (SEQ ID NO: |
| G57D (76BJN) | 2051) | | 2053) |
| VL T30Y R53L | RASQDIYNYLN | YTSLLHS | QQGDELPWT |
| T93E (76BJN) | (SEQ ID NO: | (SEQ ID NO: 2055) | (SEQ ID NO: |
| | 2054) | | 2056) |
| | ABM numbering scheme | | |
| | CDR1 | CDR2 | CDR3 |
| VH S31Y W33D | GYTFTYYDMH | RIDPYDGDIK | WDYGGYFDV |
| Q54Y S55D | (SEQ ID NO: | (SEQ ID NO: 2058) | (SEQ ID NO: |
| G57D (76BJN) | 2057) | | 2059) |
| VL T30Y R53L | RASQDIYNYLN | YTSLLHS | QQGDELPWT |
| T93E (76BJN) | (SEQ ID NO: | (SEQ ID NO: 2061) | (SEQ ID NO: |
| | 2060) | | 2062) |
| | IMGT numbering scheme | | |
| | CDR1 | CDR2 | CDR3 |
| VH S31Y W33D | GYTFTYYD | IDPYDGDI | ARWDYGGYFDV |
| Q54Y S55D | (SEQ ID NO: | (SEQ ID NO: 2064) | (SEQ ID NO: |
| G57D (76BJN) | 2063) | | 2065) |
| VL T30Y R53L | QDIYNY | YTS | QQGDELPWT |
| T93E (76BJN) | (SEQ ID NO: | (SEQ ID NO: 2067) | (SEQ ID NO: |
| | 2066) | | 2068) |
| 77BJN | Kabat numbering scheme | | |
| V-region ID | CDR1 | CDR2 | CDR3 |
| VH W33D I58V | SYDMH | RIDPQSGGVKYAQKFQG | WDYGGYFDV |
| (77BJN) | (SEQ ID NO: | (SEQ ID NO: 2070) | (SEQ ID MO: |
| | 2069) | | 2071) |
| VL T30Y R53V | RASQDIYNYLN | YTSVLHS | QQGDELPWTF |
| T93E (77BJN) | (SEQ ID NO: | (SEQ ID NO: 2073) | (SEQ ID NO: |
| | 2072) | | 2074) |
| | Chothia numbering scheme | | |
| | CDR1 | CDR2 | CDR3 |
| VH W33D I58V | GYTFTSY | DPQSGG | WDYGGYFDV |
| (77BJN) | (SEQ ID NO: | (SEQ ID NO: 2076) | (SEQ ID NO: |
| | 2075) | | 2077) |
| VL T30Y R53V | RASQDIYNYLN | YTSVLHS | QQGDELPWTF |
| T93E (77BJN) | (SEQ ID NO: | (SEQ ID NO: 2079) | (SEQ ID NO: |
| | 2078) | | 2080) |
| | ABM numbering scheme | | |
| | CDR1 | CDR2 | CDR3 |
| VH W33D I58V | GYTFTSYDMH | RIDPQSGGVK | WDYGGYFDV |
| (77BJN) | (SEQ ID NO: | (SEQ ID NO: 2082) | (SEQ ID NO: |
| | 2081) | | 2083) |
| VL T30Y R53V | RASQDIYNYLN | YTSVLHS | QQGDELPWTF |
| T93E (77BJN) | (SEQ ID NO: 2084) | (SEQ ID NO: 2085) | (SEQ ID NO: 2086) |
| | IMGT numbering scheme | | |
| | CDR1 | CDR2 | CDR3 |
| VH W33D I58V | GytftsYD | IDPQSGGV | ARWDYGGYFDV |
| (77BJN) | (SEQ ID NO: | (SEQ ID NO: 2088) | (SEQ ID NO: |
| | 2087) | | 2089) |
| VL T30Y R53V | QDIYNY | YTS | QQGDELPWTF |
| T93E (77BJN) | (SEQ ID NO: | (SEQ ID NO: 2091) | (SEQ ID NO: |
| | 2090) | | 2092) |
| 78BJN | Kabat numbering scheme | | |
| V-region ID | CDR1 | CDR2 | CDR3 |
| VH W33D K59R | SYDMH | RIDPQSGGIRYAQKFQG | WDYGGYFDV |
| (78BJN) | (SEQ ID NO: | (SEQ ID NO: 2094) | (SEQ ID NO: |
| | 2093) | | 2095) |
| VL T30Y R53N | RASQDIYNYLN | YTSNLHS | QQGDELPWT |
| T93E (78BJN) | (SEQ ID NO: | (SEQ ID NO: 2097) | (SEQ ID NO: |
| | 2096) | | 2098) |
| | Chothia numbering scheme | | |
| | CDR1 | CDR2 | CDR3 |
| VH W33D I<59R | GYTFTSY | DPQSGG | WDYGGYFDV |
| (78BJN) | (SEQ ID NO: | (SEQ ID NO: 2100) | (SEQ ID NO: |
| | 2099) | | 2101) |
| VL T30Y R53N | RASQDIYNYLN | YTSNLHS | QQGDELPWT |
| T93E (78BJN) | (SEQ ID NO: | (SEQ ID NO: 2103) | (SEQ ID NO: |
| | 2102) | | 2104) |
| | ABM numbering scheme | | |
| | CDR1 | CDR2 | CDR3 |
| VH W33D K59R | GYTFTSYDMH | RIDPQSGGIR | WDYGGYFDV |
| (78BJN) | (SEQ ID NO: | (SEQ ID NO: 2106) | (SEQ ID MO: |
| | 2105) | | 2107) |
| VL T30Y R53N | RASQDIYNYLN | YTSNLHS | QQGDELPWT |
| T93E (78BJN) | (SEQ ID NO: | (SEQ ID NO: 2109) | (SEQ ID NO: |
| | 2108) | | 2110) |
| | IMGT numbering scheme | | |
| | CDR1 | CDR2 | CDR3 |
| VH W33D K59R | GYTFTSYD | IDPQSGGI | ARWDYGGYFDV |
| (78BJN) | (SEQ ID NO: | (SEQ ID NO: 2112) | (SEQ ID NO: |
| | 2111) | | 2113) |
| VL T30Y R53N | QDIYNY | YTS | QQGDELPWT |
| T93E (78BJN) | (SEQ ID NO: | (SEQ ID NO: 2115) | (SEQ ID NO: |
| | 2114) | | 2116) |
| 79BJN | Kabat numbering scheme | | |
| V-region ID | CDR1 | CDR2 | CDR3 |
| VH W33D S55D | SYDMH | RIDPQDGDVKYAQKFQG | WDYGGYFDV |
| S57D I58V | (SEQ ID NO: | (SEQ ID NO: 2118) | (SEQ ID NO: |
| (79BJN) | 2117) | | 2119) |
| VL T30Y R53G | RASQDIYNYLN | YTSGLHS | QQGDELPWT |
| T93E (79BJN) | (SEQ ID NO: | (SEQ ID NO: 2121) | (SEQ ID NO: |
| | 2120) | | 2122) |
| | Chothia numbering scheme | | |
| | CDR1 | CDR2 | CDR3 |
| VH W33D S55D | GYTFTSY | DPQDGD | WDYGGYFDV |
| S57D I58V | (SEQ ID NO: | (SEQ ID NO: 2124) | (SEQ ID NO: |
| (79BJN) | 2123) | | 2125) |
| VL T30Y R53G | RASQDIYNYLN | YTSGLHS | QQGDELPWT |
| T93E (79BJN) | (SEQ ID NO: | (SEQ ID NO: 2127) | (SEQ ID NO: |
| | 2126) | | 2128) |
| | ABM numbering scheme | | |
| | CDR1 | CDR2 | CDR3 |
| VH W33D S55D | GYTFTSYDMH | RIDPQDGDVK | WDYGGYFDV |
| S57D I58V | (SEQ ID NO: | (SEQ ID NO: 2130) | (SEQ ID NO: |
| (79BJN) | 2129) | | 2131) |
| VL T30Y R53G | RASQDIYNYLN | YTSGLHS | QQGDELPWT |
| T93E (79BJN) | (SEQ ID NO: | (SEQ ID NO: 2133) | (SEQ ID NO: |
| | 2132) | | 2134) |
| | IMGT numbering scheme | | |
| | CDR1 | CDR2 | CDR3 |
| VH W33D S55D | GYTFTSYD | IDPQDGDV | ARWDYGGYFDV |
| S57D I58V | (SEQ ID NO: | (SEQ ID NO: 2136) | (SEQ ID NO: |
| (79BJN) | 2135) | | 2137) |
| VL T30Y R53G | QDIYNY | YTS | QQGDELPWT |
| T93E (79BJN) | (SEQ ID NO: | (SEQ ID NO: 2139) | (SEQ ID NO: |
| | 2138) | | 2140) |
| 80BJN | Kabat numbering scheme | | |
| V-region ID | CDR1 | CDR2 | CDR3 |
| VH W33D K59R | SYDMH | RIDPQSGGIRYAQKFQG | WDYGGQFDV |
| Y104Q (80BJN) | (SEQ ID NO: | (SEQ ID NO: 2142) | (SEQ ID NO: |
| | 2141) | | 2143) |
| VL T30Y R53I | RASQDIYNYLN | YTSILHS | QQGDTLPWT |
| (80BJN) | (SEQ ID NO: | (SEQ ID NO: 2145) | (SEQ ID NO: |
| | 2144) | | 2146) |
| | Chothia numbering scheme | | |
| | CDR1 | CDR2 | CDR3 |
| VH W33D K59R | GYTFTSY | DPQSGG | WDYGGQFDV |
| Y104Q (80BJN) | (SEQ ID NO: | (SEQ ID NO: 2148) | (SEQ ID NO: |
| | 2147) | | 2149) |
| VL T30Y R53I | RASQDIYNYLN | YTSILHS | QQGDTLPWT |
| (80BJN) | (SEQ ID NO: 2150) | (SEQ ID NO: 2151) | (SEQ ID NO: 2152) |
| | ABM numbering scheme | | |
| | CDR1 | CDR2 | CDR3 |
| VH W33D K59R | GYTFTSYDMH | RIDPQSGGIR | WDYGGQFDV |
| Y104Q (80BJN) | (SEQ ID NO: | (SEQ ID NO: 2154) | (SEQ ID NO: |
| | 2153) | | 2155) |
| VL T30Y R53I | RASQDIYNYLN | YTSILHS | QQGDTLPWT |
| (80BJN) | (SEQ ID NO: | (SEQ ID NO: 2157) | (SEQ ID NO: |
| | 2156) | | 2158) |
| | iMGT numbering scheme | | |
| | CDR1 | CDR2 | CDR3 |
| VH W33D K59R | GYTFTSYD | IDPQSGGI | ARWDYGGQFDV |
| Y104Q (80BJN) | (SEQ ID NO: | (SEQ ID NO: 2160) | (SEQ ID NO: |
| | 2159) | | 2161) |
| VL T30Y R53I | QDIYNY | YTS | QQGDTLPWT |
| (80BJN) | (SEQ ID NO: | (SEQ ID NO: 2163) | (SEQ ID NO: |
| | 2162) | | 2164) |
| 81BJN | Kabat numbering scheme | | |
| V-region ID | CDR1 | CDR2 | CDR3 |
| VH S31E W33D | EYDMH | RIDPQSGGIRYAQKFQG | WDYGGQFDA |
| K59R Y104Q | (SEQ ID NO: | (SEQ ID NO: 2166) | (SEQ ID NO: |
| V107A (81BJN) | 2165) | | 2167) |
| VL T30Y R53V | RASQDIYNYLN | YTSVLHS | QQGDTLPWT |
| (81BJN) | (SEQ ID NO: | (SEQ ID NO: 2169) | (SEQ ID NO: |
| | 2168) | | 2170) |
| | Chothia numbering scheme | | |
| | CDR1 | CDR2 | CDR3 |
| VH S3IE W33D | GYTFTEY | DPQSGG | WDYGGQFDA |
| K59R Y104Q | (SEQ ID NO: | (SEQ ID NO: 2172) | (SEQ ID NO: |
| V107A (81BJN) | 2171) | | 2173) |
| VL T30Y R53V | RASQDIYNYLN | YTSVLHS | QQGDTLPWT |
| (81BJN) | (SEQ ID NO: | (SEQ ID NO: 2175) | (SEQ ID NO: |
| | 2174) | | 217 6) |
| | ABM numbering scheme | | |
| | CDR1 | CDR2 | CDR3 |
| VH S31E W33D | GYTFTEYDMH | RIDPQSGGIR | WDYGGQFDA |
| K59R Y104Q | (SEQ ID NO: | (SEQ ID NO: 2178) | (SEQ ID NO: |
| V107A (81BJN) | 2177) | | 2179) |
| VL T30Y R53V | RASQDIYNYLN | YTSVLHS | QQGDTLPWT |
| (81BJN) | (SEQ ID NO: | (SEQ ID NO: 2181) | (SEQ ID NO: |
| | 2180) | | 2182) |
| | IMGT numbering scheme | | |
| | CDR1 | CDR2 | CDR3 |
| VH S31E W33D | GYTFTEYD | IDPQSGGI | ARWDY GGQFDA |
| K59R Y104Q | (SEQ ID NO: | (SEQ ID NO: 2184) | (SEQ ID NO: |
| V107A (81BJN) | 2183) | | 2185) |
| VL T30Y R53V | QDIYNY | YTS | QQGDTLPWT |
| (81BJN) | (SEQ ID NO: | (SEQ ID NO: 2187) | (SEQ ID NO: |
| | 2186) | | 2188) |
| 82BJN | Kabat numbering scheme | | |
| V-region ID | CDR1 | CDR2 | CDR3 |
| VH W33Y H35N | SYYMN | RIDPQSGGVKYAQKFQG | WHYGGQFDV |
| I58V D100H | (SEQ ID NO: | (SEQ ID NO: 2190) | (SEQ ID NO: |
| Y104Q (82BJN) | 2189) | | 2191) |
| VL T30Y R53G | RASQDIYNYLN | YTSGLHS | QQGDTLPWT |
| (82BJN) | (SEQ ID NO: | (SEQ ID NO: 2193) | (SEQ ID NO: |
| | 2192) | | 2194) |
| | Chothia numbering scheme | | |
| | CDR1 | CDR2 | CDR3 |
| VH VJ33Y H35N | GYTFTSY | IDPQSGGV | WHYGGQFDV |
| I58V D100H | (SEQ ID NO: | (SEQ ID NO: 2196) | (SEQ ID NO: |
| Y104Q (82BJN) | 2195) | | 2197) |
| VL T30Y R53G | RASQDIYNYLN | YTSGLHS | QQGDTLPWT |
| (82BJN) | (SEQ ID NO: | (SEQ ID NO: 2199) | (SEQ ID NO: |
| | 2198) | | 2200) |
| | ABM numbering scheme | | |
| | CDR1 | CDR2 | CDR3 |
| VH W33Y H35N | GYTFTSYYMN | RIDPQSGGVK | WHYGGQFDV |
| I58V D100H | (SEQ ID NO: | (SEQ ID NO: 2202) | (SEQ ID NO: |
| Y104Q (82BJN) | 2201) | | 2203) |
| VL T30Y R53G | RASQDIYNYLN | YTSGLHS | QQGDTLPWT |
| (82BJN) | (SEQ ID NO: | (SEQ ID NO: 2205) | (SEQ ID NO: |
| | 2204) | | 2206) |
| | IMGT numbering scheme | | |
| | CDR1 | CDR2 | CDR3 |
| VH W33Y H35N | GYTFTSYY | IDPQSGGV | ARWHYGGQFDV |
| I58V D100H | (SEQ ID NO: | (SEQ ID NO: 2208) | (SEQ ID NO: |
| Y104Q (82BJN) | 2207) | | 2209) |
| VL T30Y R53G | QDIYNY | YTS | QQGDTLPWT |
| (82BJN) | (SEQ ID NO: | (SEQ ID NO: 2211) | (SEQ ID NO: |
| | 2210) | | 2212) |

### Example 13: Next Generation Sequencing (NS) Analysis of 20E6 Variants from Yeast Selection Outputs

[0812] To more comprehensively understand the CDR residue changes that are selected from the different sorting gates for better binding to LAP-TGFb1 protein by yeast display, investigators isolated 20E6 variant sequences from each of the outputs and subjected them to next generation sequences. It was thought that the sequences derived from the NGS analysis may provide additional information on critical residues at each CDR position that contribute to improved LAP-TGFb1 binding individually or in combination. The increased available sequences allowed the selection of 20E6 variants that had the most optimal binding to LAP-TGFb1 while minimizing impact on potentially increased immunogenicity or developability.

### Example 14: Yeast Display Mutants Binding Human LAP-TGFb Isoforms 1, 2, and 3

[0813] This Example describes the isoform specificity of the yeast display mutants to bind to human LAP-TGFβ isoforms 1, 2, and 3 using surface plasmon resonance. A Series S CM4 sensor chip (GE Healthcare, catalog BR100534) was immobilized with an anti-human Fc capture antibody following the kit protocol (GE Healthcare, catalog BR100839) on a Biacore T200 instrument with 1× HBS-EP+ (Teknova, catalog H8022). Kinetic binding interactions between human LAP-TGFβ isoform 1 and yeast display mutants were analyzed in 1× HBS-EP+ with 0.1 mg/mL BSA (Jackson Immunoresearch, catalog 001-000-162) at 25° C. Approximately 20-40 RU amounts of human LAP-TGFβ-Fc isoform 1 were captured to the anti-human Fc surface followed by injection of 1:4 serially diluted Fab from 1000 nM to 3.91 nM (20E6), 100 nM to 0.39 nM (mutants 55BJN-66BJN), 25 nM to 0.097 nM (mutants 67BJN-69BJN, 71BJN-79BJN), and 1:3 serially diluted Fab from 6 nM to 0.07 nM (mutants 80BJN-82BJN) and including a negative control 0 nM Fab. Binding specificity experiments between human LAP-TGFβ isoforms 2 and 3 and yeast display mutants were performed in 1× HBS-EP+ with 0.1 mg/mL BSA at 25° C. Approximately 20-40 RU amounts of human LAP-TGFβ2 and 3 were captured to the anti-human Fc surface followed by injection of 1000 nM Fab including a negative control 0 nM Fab. The binding data were double referenced by subtraction of signal from a reference (capture surface only) flow cell and the negative control 0 nM Fab injection. Binding rate constants were determined by fitting the data with a 1:1 binding model (GE Healthcare Biacore T200 Evaluation software 3.0).

[0814] As shown in FIG. 11 and Table 44, the 20E6 antibody bound to human LAP-TGFβ1 with nanomolar affinity, but no appreciable signal increase was observed for human LAP-TGFβ isoformn 2 or 3. The 20E6 variants demonstrated affinities which span over four logs of improvement in binding affinity to human LAP-TGFβ1 over the non-affinity matured 20E6 antibody. These affinity improvements largely resulted from improved, or slowed, off-rates however several mutants did exhibit improved on-rates, up to 6-fold, over 20E6.

TABLE 44
Binding parameters for 20E6 and yeast display mutants binding to human LAP-TGFβ isoforms 1, 2, and 3

| | | LAP-TGFβ1 | | | | | |
|---|---|---|---|---|---|---|---|
| | | | | | Fold | LAP-TGFβ2 | LAP-TGFβ3 |
| | Sorting | kₒₙ | k_{off} | K_{D} | improvement | K_{D} | K_{D} |
| ID | population | (M⁻¹s⁻¹) | (s⁻¹) | (M) | in K_{D} | (M) | (M) |
| 20E6 (80BGJ) | Parent | 0.96 × 10⁶ | 7.69 × 10⁻² | 7.99 × 10⁻⁸ | 1 | NB | NB |
| 55BJN | 2 hr P3 | 1.10 × 10⁵ | 2.67 × 10⁻² | 2.44 × 10⁻⁸ | 3 | NB | NB |
| 56BJN | 2 hr P3 | 2.53 × 10⁶ | 1.67 × 10⁻² | 6.63 × 10⁻⁸ | 1 | NB | NB |
| 57BJN | 2 hr P4 | 1.33 × 10⁶ | 1.78 × 10⁻² | 1.34 × 10⁻⁸ | 6 | NB | NB |
| 58BJN | 2 hr P3 | 2.35 × 10⁶ | 1.51 × 10⁻² | 6.42 × 10⁻⁹ | 13 | NB | NB |
| 59BJN | 2 hr P4 | 2.24 × 10⁶ | 2.63 × 10⁻² | 1.17 × 10⁻⁸ | 7 | NB | NB |
| 60BJN | 2 hr P3 | 2.54 × 10⁶ | 6.53 × 10⁻³ | 2.57 × 10⁻⁹ | 31 | NB | NB |
| 61BJN | 2 hr P4 | 1.59 × 10⁶ | 2.79 × 10⁻¹ | 1.75 × 10⁻⁷ | 1 | NB | NB |
| 62BJN | 2 hr P4 | 2.05 × 10⁶ | 3.20 × 10⁻² | 1.56 × 10⁻⁸ | 5 | NB | NB |
| 63BJN | 2 hr P3 | 1.64 × 10⁶ | 5.30 × 10⁻³ | 3.23 × 10⁻⁹ | 25 | NB | NB |
| 64BJN | 2 hr P3 | 3.57 × 10⁶ | 7.70 × 10⁻³ | 2.15 × 10⁻⁹ | 37 | NB | NB |
| 65BJN | 2 hr P4 | 2.94 × 10⁶ | 2.38 × 10⁻² | 8.12 × 10⁻⁹ | 10 | NB | NB |
| 66BJN | 2 hr P3 | 2.11 × 10⁶ | 1.31 × 10⁻² | 6.21 × 10⁻⁹ | 13 | NB | NB |
| 67BJN | 2 hr P2 | 4.87 × 10⁶ | 7.62 × 10⁻⁴ | 1.56 × 10⁻¹⁰ | 512 | NB | NB |
| 68BJN | 2 hr P1 | 4.36 × 10⁶ | 8.34 × 10⁻⁵ | 1.91 × 10⁻¹¹ | 4205 | NB | NB |
| 69BJN | 2 hr P1 | 4.25 × 10⁶ | 4.88 × 10⁻⁴ | 1.15 × 10⁻¹⁰ | 695 | NB | NB |
| 71BJN | 2 hr P1 | 2.71 × 10⁶ | 6.80 × 10⁻⁵ | 2.51 × 10⁻¹¹ | 3196 | NB | NB |
| 72BJN | 2 hr P2 | 4.85 × 10⁶ | 2.98 × 10⁻³ | 6.15 × 10⁻¹⁰ | 130 | NB | NB |
| 73BJN | 2 hr P2 | 5.15 × 10⁶ | 3.10 × 10⁻³ | 6.01 × 10⁻¹⁰ | 133 | NB | NB |
| 74BJN | 2 hr P2 | 4.45 × 10⁶ | 1.81 × 10⁻³ | 4.08 × 10⁻¹⁰ | 196 | NB | NB |
| 75BJN | 2 hr P1 | 5.05 × 10⁶ | 3.43 × 10⁻³ | 6.78 × 10⁻¹¹ | 1178 | NB | NB |
| 76BJN | 2 hr P1 | 1.80 × 10⁶ | 1.86 × 10⁻⁴ | 1.04 × 10⁻¹⁰ | 768 | NB | NB |
| 77BJN | 2 hr P1 | 5.22 × 10⁶ | 2.70 × 10⁻⁴ | 5.17 × 10⁻¹¹ | 1545 | NB | NB |
| 78BJN | 2 hr P1 | 5.52 × 10⁶ | 3.93 × 10⁻⁴ | 7.13 × 10⁻¹¹ | 1121 | NB | NB |
| 79BJN | 2 hr P1 | 5.84 × 10⁶ | 1.28 × 10⁻⁴ | 2.20 × 10⁻¹¹ | 3632 | NB | NB |
| 80BJN | 12 hr P1 | 4.15 × 10⁶ | 2.52 × 10⁻⁵ | 6.07 × 10⁻¹² | 13163 | NB | NB |
| 81BJN | 12 hr P1 | 4.08 × 10⁶ | 2.56 × 10⁻⁵ | 6.29 × 10⁻¹² | 12702 | NB | NB |
| 82BJN | 12 hr P1 | 2.81 × 10⁶ | 2.60 × 10⁻⁵ | 9.28 × 10⁻¹² | 8610 | NB | NB |

NB: No binding observed

### Example 15: Kinetic exclusion assay affinity assessment of a yeast display mutant 69BJN binding human LAP-TGFβ1

[0815] An orthogonal kinetic exclusion assay (KinExA) method was used in this study to measure the affinity of an affinity-matured anti-LAP-TGF β1 Fab 69BJN (referred to as the constant binding partner, CBP) and human LAP-TGFβ1 (referred to as the titrant). To determine the free CBP concentration in solution, PMMA beads (Sapidyne, catalog 440176) were coated with human LAP-TGFβ1 and then blocked with BSA (Jackson Immunoresearch, catalog 001-000-162). Two equilibrium experiments were prepared in assay buffer (1× PBS, 1 mg/mL BSA, and 0.05% NaN₃) with 5 pM or 100 pM of 69BJN as CBP followed by mixing and equilibrating with 1:10 serially diluted human LAP-TGFβ1 from 10 nM to 1 pM including a negative control 0 nM. The KinExA method was performed as follows: PMMA beads were loaded into the flow cell, a single concentration of titrant human LAP-TGFβ1 at equilibrium with 69BJN CBP was flowed over the flow cell, free CBP bound by PMMA beads was detected with rabbit anti-human IgG, F(ab′)₂ fragment specific-647 conjugate (Jackson Immunoresearch, catalog 309-005-006). This method was repeated in duplicate over the entire concentration series for each of the two different equilibrium series. The binding signals were analyzed with KinExA Pro software (version 4.4.26) where the free CBP binding signals were converted into percent free response and plotted against the titrant concentration series. The equilibrium K_{D} was determined by using the titrant concentration as a reference and calculating percent activity of the ligand (CBP). As shown in FIG. 12, the equilibrium affinity analysis by KinExA shows that anti-human LAP-TGFβ1 Fab 69BJN bound to human LAP-TGFβ1 with a K_{D} of 28 pM (95% confidence interval of 21-36 pM).

### Example 16:: Selection of 15 Affinity-Matured 20E6 Variants for IgG Protein Expression

[0816] This Examples was performed to better assess the effects of 20E6 affinity improvement on in vitro and in vivo assays across a wide affinity range while increasing sequence identity to human antibodies by incorporating LCDR2 E55/T56 human germline mutations as well as optimizing pI value of the IgG protein to below 9.0. Investigators selected 15 additional 20E6 variants for IgG expression. In further examples, investigators analyzed if the IgG proteins bound to human LAP-TGFb1 at both pH 7.4 and pH 6.0. The selections were also based on choosing sequences that have as few CDR residue changes as possible. The sequences are listed in Tables 45A-C. An expanded table listing the CDRs for these 15 antibodies by different numbering schemes is also provided in Table 45A.

[0817] The further studies were performed with the affinity matured 20E6 antibody and antigen-binding fragments thereof such that the molecules were engineered to include further modifications to CDR residues within the variable domains of the humanized affinity matured monoclonal antibodies and antigen-binding fragments thereof described above. Fifteen modified affinity matured antibodies were named 06BLM, 07BLM, 08BLM, 09BLM, 10BLM, 11BLM, 12BLM, 13BLM, 14BLM, 15BLM, 16BLM, 17BLM, 18BLM, 19BLM, and 20BLM

[0818] The modifications were analyzed for ability to increase the affinity of the antibody or antigen binding fragment thereof. Table 45A, Table 45B, and Table 45C list the CDR sequences (i.e., Kabat, Chothia, ABM, and IMGT numbering schemes), VH and VL amino acid sequences, and heavy chain and light chain sequences, respectively, of the modified affinity matured antibodies 06BLM, 07BLM, 08BLM, 09BLM, 10BLM, 11BLM, 12BLM, 13BLM, 14BLM, 15BLM, 16BLM, 17BLM, 18BLM, 19BLM, and 20BLM.

[0819] Functional EC50 inhibition data for the parental 20E6 humanized antibody and the 15 selected affinity matured humanized antibodies are shown in Table 46 and FIG. 13.

TABLE 45A
CDR amino acid sequences for the 15 selected affinity maturation humanized
antibodies

| | Kabat numbering scheme | | |
|---|---|---|---|
| V-region ID | CDR1 | CDR2 | CDR3 |
| VH | SYDMH | RIDPQSGGIRYAQKFQG | WDYGGQFDV |
| W33D K59R | (SEQ ID NO: | (SEQ ID NO: 2230) | (SEQ ID NO: |
| Y104Q | 2229) | | 2231) |
| (06BLM) | | | |
| VL | RASQDIYNYLN | YTSILET | QQGDTLPWT |
| T30Y R53I | (SEQ ID NO: | (SEQ ID NO: 2233) | (SEQ ID NO: |
| H55E S56T | 2232) | | 2234) |
| (06BLM) | | | |
| | Chothia numbering scheme | | |
| | CDR1 | CDR2 | CDR3 |
| VH | GYTFTSY | DPQSGG | WDYGGQFDV |
| W33D K59R | (SEQ ID NO: | (SEQ ID NO: 2236) | (SEQ ID NO: |
| Y104Q | 2235) | | 2237) |
| (06BLM) | | | |
| VL | RASQDIYNYLN | YTSILET | QQGDTLPWT |
| T30Y R53I | (SEQ ID NO: | (SEQ ID NO: 2239) | (SEQ ID NO: |
| H55E S56T | 2238) | | 2240) |
| (06BLM) | | | |
| | ABM numbering scheme | | |
| | CDR1 | CDR2 | CDR3 |
| VH | GYTFTSYDMH | RIDPQSGGIR | WDYGGQFDV |
| W33D K59R | (SEQ ID NO: | (SEQ ID NO: 2242) | (SEQ ID NO: |
| Y104Q | 2241) | | 2243) |
| (06BLM) | | | |
| VL | RASQDIYNYLN | YTSILET | QQGDTLPWT |
| T30Y R53I | (SEQ ID NO: | (SEQ ID NO: 2245) | (SEQ ID NO: |
| H55E S56T | 2244) | | 2246) |
| (06BLM) | | | |
| | IMGT numbering scheme | | |
| | CDR1 | CDR2 | CDR3 |
| VH | GYTFTSYD | IDPQSGGI | ARWDYGGQFDV |
| W33D K59R | (SEQ ID NO: | (SEQ ID NO: 2248) | (SEQ ID NO: |
| Y104Q | 2247) | | 2249) |
| (06BLM) | | | |
| VL | QDIYNY | YTS | QQGDTLPWT |
| T30Y R53I | (SEQ ID NO: | (SEQ ID NO: 2251) | (SEQ ID NO: |
| H55E S56T | 2250) | | 2252) |
| (06BLM) | | | |
| | Kabat numbering scheme | | |
| V-region ID | CDR1 | CDR2 | CDR3 |
| VH W33D K59R | SYDIH | RIDPQSGGIRYAQKFQG | WDYGGYFDV |
| (07BLM) | (SEQ ID NO: | (SEQ ID NO: 2254) | (SEQ ID NO: |
| | 2253) | | 2255) |
| VL W33D K59R | RASQDIYSYLN | YTSNLET | QQGDTLPWT |
| (07BLM) | (SEQ ID NO: | (SEQ ID NO: 2257) | (SEQ ID NO: |
| | 2256) | | 2258) |
| | Chothia numbering scheme | | |
| | CDR1 | CDR2 | CDR3 |
| VH W33D K59R | GYTFTSY | DPQSGG | WDYGGYFDV |
| (07BLM) | (SEQ ID NO: | (SEQ ID NO: 2260) | (SEQ ID NO: |
| | 2259) | | 2261) |
| VL W33D K59R | RASQDIYSYLN | YTSNLET | QQGDTLPWT |
| (07BLM) | (SEQ ID NO: | (SEQ ID NO: 2263) | (SEQ ID NO: |
| | 2262) | | 2264) |
| | ABM numbering scheme | | |
| | CDR1 | CDR2 | CDR3 |
| VH W33D K59R | GYTFTSYDMH | RIDPQSGGIR | WDYGGYFDV |
| (07BLM) | (SEQ ID NO: | (SEQ ID NO: 2266) | (SEQ ID NO: |
| | 2265) | | 2267) |
| VL W33D K59R | RASQDIYSYLN | YTSNLET | QQGDTLPWT |
| (07BLM) | (SEQ ID NO: | (SEQ ID NO: 2269) | (SEQ ID NO: |
| | 2268) | | 2270) |
| | IMGT numbering scheme | | |
| | CDR1 | CDR2 | CDR3 |
| VH W33D K59R | GYTFTSYD | IDPQSGGI | ARWDYGGYFDV |
| (07BLM) | (SEQ ID NO: | ((SEQ ID NO: | (SEQ ID NO: |
| | 2271) | 2272) | 2273) |
| VL W33D K59R | QDIYSY | YTS | QQGDTLPWT |
| (07BLM) | (SEQ ID NO: | (SEQ ID NO: 2275) | (SEQ ID NO: |
| | 2274) | | 2276) |
| | Kabat numbering scheme | | |
| V-region ID | CDR1 | CDR2 | CDR3 |
| VH W33D I58T | SYDMH | RIDPQSGGTKYAQKFQG | WDYGGQFDV |
| Y104Q | (SEQ ID NO: | (SEQ ID NO: 2278) | (SEQ ID NO: |
| (08BLM) | 2277) | | 2279) |
| VL T30Y R53G | RASQDIYNYLN | YTSGLET | QQGDTLPWT |
| H55E S56T | (SEQ ID NO: | (SEQ ID NO: 2281) | (SEQ ID NO: |
| (08BLM) | 2280) | | 2282) |
| | Chothia numbering scheme | | |
| | CDR1 | CDR2 | CDR3 |
| VH W33D I58T | GYTFTSY | DPQSGG | WDYGGQFDV |
| Y104Q | (SEQ ID NO: | (SEQ ID NO: 2284) | (SEQ ID NO: |
| (08BLM) | 2283) | | 2285) |
| VL T30Y R53G | RASQDIYNYLN | YTSGLET | QQGDTLPWT |
| H55E S56T | (SEQ ID NO: | | (SEQ ID NO: 2287) |
| (08BLM) | 2286) | | 2288) |
| | ABM numbering scheme | | |
| | CDR1 | CDR2 | CDR3 |
| VH W33D I58T | GYTFTSYDMH | RIDPQSGGTK | WDYGGQFDV |
| Y104Q | (SEQ ID NO: | (SEQ ID NO: 2290) | (SEQ ID NO: |
| (08BLM) | 2289) | | 2291) |
| VL T30Y R53G | RASQDIYNYLN | YTSGLET | QQGDTLPWT |
| H55E S56T | (SEQ ID NO: | (SEQ ID NO: 2293) | (SEQ ID NO: |
| (08BLM) | 2292) | | 2294) |
| | IMGT numbering scheme | | |
| | CDR1 | CDR2 | CDR3 |
| VH W33D I58T | GYTFTSYD | IDPQSGGT | ARWDYGGQFDV |
| Y104Q | (SEQ ID NO: | (SEQ ID NO: 2296) | (SEQ ID NO: |
| (08BLM) | 2295) | | 2297) |
| VL T30Y R53G | QDIYNY | YTS | QQGDTLPWT |
| H55E S56T | (SEQ ID NO: | (SEQ ID NO: 2299) | (SEQ ID NO: |
| (08BLM) | 2298) | | 2300) |
| | Kabat numbering scheme | | |
| V-region ID | CDR1 | CDR2 | CDR3 |
| VH W33D Q54I | SYDMH | RIDPISGGIKYAQKFQG | WDYGGYFDV |
| (09BLM) | (SEQ ID NO: | (SEQ ID NO: 2302) | (SEQ ID NO: |
| | 2301) | | 2303) |
| VL T30F R53H | RASQDIFNYLN | YTSHLET | QQGDTLPWT |
| H55E S56T | (SEQ ID NO: | (SEQ ID NO: 2305) | (SEQ ID NO: |
| (09BLM) | 2304) | | 2306) |
| | Chothia numbering scheme | | |
| | CDR1 | CDR2 | CDR3 |
| VH W33D Q541 | GYTFTSY | DPISGG | WDYGGYFDV |
| (09BLM) | (SEQ ID NO: | (SEQ ID NO: 2308) | (SEQ ID NO: |
| | 2307) | | 2309) |
| VL T30F R53H | RASQDIFNYLN | YTSHLET | QQGDTLPWT |
| H55E S56T | (SEQ ID NO: | (SEQ ID NO: 2311) | (SEQ ID NO: |
| (09BLM) | 2310) | | 2312) |
| | ABM numbering scheme | | |
| | CDR1 | CDR2 | CDR3 |
| VH W33D Q54I | GYTFTSYDMH | RIDPISGGIK | WDYGGYFDV |
| (09BLM) | (SEQ ID NO: | (SEQ ID NO: 2314) | (SEQ ID NO: |
| | 2313) | | 2315) |
| VL T30F R53H | RASQDIFNYLN | YTSHLET | QQGDTLPWT |
| H55E S56T | (SEQ ID NO: | (SEQ ID NO: 2317) | (SEQ ID NO: |
| (09BLM) | 2316) | | 2318) |
| | IMGT numbering scheme | | |
| | CDR1 CDR2 | | CDR3 |
| VH W33D Q54I | GYTFTSYD | IDPISGGI (SEQ ID | ARWDYGGYFDV |
| (09BLM) | (SEQ ID NO: | NO: 2320) | (SEQ ID NO: |
| | 2319) | | 2321) |
| VL T30F R53H | QDIFNY | YTS | QQGDTLPWT |
| H55E S56T | (SEQ ID NO: | (SEQ ID NO: 2323) | (SEQ ID NO: |
| (09BLM) | 2322) | | 2324) |
| | Kabat numbering scheme | | |
| V-region ID | CDR1 | CDR2 | CDR3 |
| VH W33D I58T | SYDMH | RIDPQSGGTKYAQKFQG | WDYGGYFDV |
| (10BLM) | (SEQ ID NO: | (SEQ ID NO: 2326) | (SEQ ID NO: |
| | 2325) | | 2327) |
| VL T30Y R53V | RASQDIYNYLN | YTSVLET | QQGDTLPWT |
| H55E S56T | (SEQ ID NO: | (SEQ ID NO: 2329) | (SEQ ID NO: |
| (10BLM) | 2328) | | 2330) |
| | Chothia numbering scheme | | |
| | CDR1 | CDR2 | CDR3 |
| VH W33D I58T | GYTFTSY | DPQSGG | WDYGGYFDV |
| (10BLM) | (SEQ ID NO: | (SEQ ID NO: 2332) | (SEQ ID NO: |
| | 2331) | | 2333) |
| VL T30Y R53V | RASQDIYNYLN | YTSVLET | QQGDTLPWT |
| H55E S56T | (SEQ ID NO: | (SEQ ID NO: 2335) | (SEQ ID NO: |
| (10BLM) | 2334) | | 2336) |
| | ABM numbering scheme | | |
| | CDR1 | CDR2 | CDR3 |
| VH W33D I58T | GYTFTSYDMH | RIDPQSGGTK | DYGGYFDV |
| (10BLM) | (SEQ ID NO: | (SEQ ID NO: 2338) | (SEQ ID NO: |
| | 2337) | | 2339) |
| VL T30Y R53V | RASQDIYNYLN | YTSVLET | QQGDTLPWT |
| H55E S56T | (SEQ ID NO: | (SEQ ID NO: 2341) | (SEQ ID NO: |
| (10BLM) | 2340) | | 2342) |
| | IMGT numbering scheme | | |
| | CDR1 | CDR2 | CDR3 |
| VH W33D I58T | GYTFTSYD | IDPQSGGT | ARWDYGGYFDV |
| (10BLM) | (SEQ ID NO: | (SEQ ID NO: 2344) | (SEQ ID NO: |
| | 2343) | | 2345) |
| VL T30Y R53V | QDIYNY | YTS | QQGDTLPWT |
| H55E S56T | (SEQ ID NO: | (SEQ ID NO: 2347) | (SEQ ID NO: |
| (10BLM) | 2346) | | 2348) |
| | Kabat numbering scheme | | |
| V-region ID | CDR1 | CDR2 | CDR3 |
| VH W33D | SYDMH | RIDPQSGGIRYAQKFQG | WDYGGYFDV |
| K59R (11BLM) | (SEQ ID NO: | (SEQ ID NO: 2350) | (SEQ ID NO: |
| | 2349) | | 2351) |
| VL T30Y | RASQDIYNYLN | YTSVLET | QQGDTLPWT |
| R53V H55E | (SEQ ID NO: | (SEQ ID NO: 2353) | (SEQ ID NO: |
| S56T (11BLM) | 2352) | | 2354) |
| | Chothia numbering scheme | | |
| | CDR1 | CDR2 | CDR3 |
| VH W33D | GYTFTSY | DPQSGG | WDYGGYFDV |
| K59R (11BLM) | (SEQ ID NO: | (SEQ ID NO: 2356) | (SEQ ID NO: |
| | 2355) | | 2357) |
| VL T30Y | RASQDIYNYLN | YTSVLET | QQGDTLPWT |
| R53V H55E | (SEQ ID NO: | (SEQ ID NO: 2359) | (SEQ ID NO: |
| S56T (11BLM) | 2358) | | 2360) |
| | ABM numbering scheme | | |
| | CDR1 | CDR2 | CDR3 |
| VH W33D | GYTFTSYDMH | RIDPQSGGIR | WDYGGYFDV |
| K59R (11BLM) | (SEQ ID NO: | (SEQ ID NO: 2362) | (SEQ ID NO: |
| | 2361) | | 2363) |
| VL T30Y | RASQDIYNYLN | YTSVLET | QQGDTLPWT |
| R53V H55E | (SEQ ID NO: | (SEQ ID NO: 2365) | (SEQ ID NO: |
| S56T (11BLM) | 2364) | | 2366) |
| | IMGT numbering scheme | | |
| | CDR1 | CDR2 | CDR3 |
| VH W33D | GYTFTSYD | IDPQSGGI | ARWDYGGYFDV |
| K59R (11BLM) | (SEQ ID NO: | (SEQ ID NO: 2368) | (SEQ ID NO: |
| | 2367) | | 2369) |
| VL T30Y | QDIYNY | YTS | QQGDTLPWT |
| R53V H55E | (SEQ ID NO: | (SEQ ID NO: 2371) | (SEQ ID NO: |
| S56T (11BLM) | 2370) | | 2372) |
| | Kabat numbering scheme | | |
| V-region ID | CDR1 | CDR2 | CDR3 |
| VH W33D | SYDMH | RIDPQSGGVKYAQKFQG | WDYGGYFDV |
| I58V (12BLM) | (SEQ ID NO: | (SEQ ID NO: 2374) | (SEQ ID NO: |
| | 2373) | | 2375) |
| VL T30Y R53V | RASQDIYNYLN | YTSVLET | QQGDELPWT |
| T93E H55E | (SEQ ID NO: | (SEQ ID NO: 2377) | (SEQ ID NO: |
| S56T (12BLM) | 2376) | | 2378) |
| | Chothia numbering scheme | | |
| | CDR1 | CDR2 | CDR3 |
| VH W33D | GYTFTSY | DPQSGG | WDYGGYFDV |
| I58V (12BLM) | (SEQ ID NO: | (SEQ ID NO: 2380) | (SEQ ID NO: |
| | 2379) | | 2381) |
| VL T30Y R53V | RASQDIYNYLN | TSVLET | QQGDELPWT |
| T93E H55E | (SEQ ID NO: | (SEQ ID NO: 2383) | (SEQ ID NO: |
| S56T (12BLM) | 2382) | | 2384) |
| | ABM numbering scheme | | |
| | CDR1 | CDR2 | CDR3 |
| VH W33D | GYTFTSYDMH | RIDPQSGGVK | WDYGGYFDV |
| I58V (12BLM) | (SEQ ID NO: | (SEQ ID NO: 2386) | (SEQ ID NO: |
| | 2385) | | 2387) |
| VL T30Y R53V | RASQDIYNYLN | YTSVLET | QQGDELPWT |
| T93E H55E | (SEQ ID NO: | (SEQ ID NO: 2389) | (SEQ ID NO: |
| S56T (12BLM) | 2388) | | 2390) |
| | IMGT numbering scheme | | |
| | CDR1 | CDR2 | CDR3 |
| VH W33D | GYTFTSYD | IDPQSGGV | ARWDYGGYFDV |
| I58V (12BLM) | (SEQ ID NO: | (SEQ ID NO: 2392) | (SEQ ID NO: |
| | 2391) | | 2393) |
| VL T30Y R53V | QDIYNY | YTS | QQGDELPWT |
| T93E H55E | (SEQ ID NO: | (SEQ ID NO: 2395) | (SEQ ID NO: |
| S56T (12BLM) | 2394) | | 2396) |
| | Kabat numbering scheme | | |
| V-region ID | CDR1 | CDR2 | CDR3 |
| VH W33D S55T | SYDMH | RIDPQTGDIKYAQKFQG | WDYGGQFDV |
| G57D Y104Q | (SEQ ID NO: | (SEQ ID NO: 2398) | (SEQ ID NO: |
| (13BLM) | 2397) | | 2399) |
| VL T30Y R53G | RASQDIYNYLN | YTSGLET | QQGDTLPWT |
| H55E S56T | (SEQ ID NO: | (SEQ ID NO: 2401) | (SEQ ID NO: |
| (13BLM) | 2400) | | 2402) |
| | Chothia numbering scheme | | |
| | CDR1 | CDR2 | CDR3 |
| VH W33D S55T | GYTFTSY | DPQTGD | WDYGGQFDV |
| G57D Y104Q | (SEQ ID NO: | (SEQ ID NO: 2404) | (SEQ ID NO: |
| (13BLM) | 2403) | | 2405) |
| VL T30Y R53G | RASQDIYNYLN | YTSGLET | QQGDTLPWT |
| H55E S56T | (SEQ ID NO: | (SEQ ID NO: 2407) | (SEQ ID NO: |
| (13BLM) | 2406) | | 2408) |
| | ABM numbering scheme | | |
| | CDR1 | CDR2 | CDR3 |
| VH W33D S55T | GYTFTSYDMH | RIDPQTGDIK | WDYGGQFDV |
| G57D Y104Q | (SEQ ID NO: | (SEQ ID NO: 2410) | (SEQ ID NO: |
| (13BLM) | 2409) | | 2411) |
| VL T30Y R53G | RASQDIYNYLN | YTSGLET | QQGDTLPWT |
| H55E S56T | (SEQ ID NO: | (SEQ ID NO: 2413) | (SEQ ID NO: |
| (13BLM) | 2412) | | 2414) |
| | IMGT numbering scheme | | |
| | CDR1 | CDR2 | CDR3 |
| VH W33D S55T | GYTFTSYD | IDPQTGDI | ARWDYGGQFDV |
| G57D Y104Q | (SEQ ID NO: | (SEQ ID NO: 2416) | (SEQ ID NO: |
| (13BLM) | 2415) | | 2417) |
| VL T30Y R53G | QDIYNY | YTS | QQGDTLPWT |
| H55E S56T | (SEQ ID NO: | (SEQ ID NO: 2419) | (SEQ ID NO: |
| (13BLM) | 2418) | | 2420) |
| | Kabat numbering scheme | | |
| V-region ID | CDR1 | CDR2 | CDR3 |
| VH W33D M34T | SYDTH | RIDPQSGGIKYAQKFQG | WDYGGYFDV |
| (14BLM) | (SEQ ID NO: | (SEQ ID NO: 2422) | (SEQ ID NO: |
| | 2421) | | 2423) |
| VL T30Y R53Y | RASQDIYNYLN | YTSYLET | QQGDTLPWT |
| H55E S56T | (SEQ ID NO: | (SEQ ID NO: 2425) | (SEQ ID NO : |
| (14BLM) | 2424) | | 2426) |
| | Chothia numbering scheme | | |
| | CDR1 | CDR2 | CDR3 |
| VH W33D M34T | GYTFTSY | DPQSGG | WDYGGYFDV |
| (14BLM) | (SEQ ID NO: | (SEQ ID NO: 2428) | (SEQ ID NO: |
| | 2427) | | 2429) |
| VL T30Y R53Y | RASQDIYNYLN | YTSYLET | QQGDTLPWT |
| H55E S56T | (SEQ ID NO: | (SEQ ID NO: 2431) | (SEQ ID NO: |
| (14BLM) | 2430) | | 2432) |
| | ABM numbering scheme | | |
| | CDR1 | CDR2 | CDR3 |
| VH W33D M34T | GYTFTSYDTH | RIDPQSGGIK | WDYGGYFDV |
| (14BLM) | (SEQ ID NO: | (SEQ ID NO: 2434) | (SEQ ID NO: |
| | 2433) | | 2435) |
| VL T30Y R53Y | RASQDIYNYLN | YTSYLET | QQGDTLPWT |
| H55E S56T | (SEQ ID NO: | (SEQ ID NO: 2437) | (SEQ ID NO: |
| (14BLM) | 2436) | | 2438) |
| | IMGT numbering scheme | | |
| | CDR1 | CDR2 | CDR3 |
| VH W33D M34T | GYTFTSYD | IDPQSGGI | ARWDYGGYFDV |
| (14BLM) | (SEQ ID NO: | (SEQ ID NO: 2440) | (SEQ ID NO: |
| | 2439) | | 2441) |
| VL T30Y R53Y | QDIYNY | YTS | QQGDTLPWT |
| H55E S56T | (SEQ ID NO: | (SEQ ID NO: 2443) | (SEQ ID NO: |
| (14BLM) | 2442) | | 2444) |
| | Kabat numbering scheme | | |
| V-region ID | CDR1 | CDR2 | CDR3 |
| VH W33D | SYDMH | RIDPQSGGIKYAQKFQG | WDYGGYFDV |
| (15BLM) | (SEQ ID NO: | (SEQ ID NO: 2446) | (SEQ ID NO: |
| | 2445) | | 2447) |
| VL T30Y H55E | RASQDIYNYLN | YTSRLET | QQGDTLPWT |
| S56T (15BLM) | (SEQ ID NO: | (SEQ ID NO: 2449) | (SEQ ID NO: |
| | 2448) | | 2450) |
| | Chothia numbering scheme | | |
| | CDR1 | CDR2 | CDR3 |
| VH W33D | GYTFTSY | DPQSGG | WDYGGYFDV |
| (15BLM) | (SEQ ID NO: | (SEQ ID NO: 2452) | (SEQ ID NO: |
| | 2451) | | 2453) |
| VL T30Y H55E | RASQDIYNYLN | YTSRLET | QQGDTLPWT |
| S56T (15BLM) | (SEQ ID NO: | (SEQ ID NO: 2455) | (SEQ ID NO: |
| | 2454) | | 2456) |
| | ABM numbering scheme | | |
| | CDR1 | CDR2 | CDR3 |
| VH W33D | GYTFTSYDMH | RIDPQSGGIK | WDYGGYFDV |
| (15BLM) | (SEQ ID NO: | (SEQ ID NO: 2458) | (SEQ ID NO: |
| | 2457) | | 2459) |
| VL T30Y H55E | RASQDIYNYLN | YTSRLET | QQGDTLPWT |
| S56T (15BLM) | (SEQ ID NO: | (SEQ ID NO: 2461) | (SEQ ID NO: |
| | 2460) | | 2462) |
| | IMGT numbering scheme | | |
| | CDR1 | CDR2 | CDR3 |
| VH W33D | GYTFTSYD | IDPQSGGI | ARWDYGGYFDV |
| (15BLM) | (SEQ ID NO: | (SEQ ID NO: 2464) | (SEQ ID NO: |
| | 2463) | | 2465) |
| VL T30Y H55E | QDIYNY | YTS | QQGDTLPWT |
| S56T (15BLM) | (SEQ ID NO: | (SEQ ID NO: 2467) | (SEQ ID NO: |
| | 2466) | | 2468) |
| | Kabat numbering scheme | | |
| V-region ID | CDR1 | CDR2 | CDR3 |
| VH W33D | SYDMH | RIDPQSGGIKYAQKFQG | WDYGGYFDV |
| (16BLM) | (SEQ ID NO: | (SEQ ID NO: 2470) | (SEQ ID NO: |
| | 2469) | | 2471) |
| VL T30Y R53V | RASQDIYNYLN | YTSVLET | QQGDTLPWT |
| H55E S56T | (SEQ ID NO: | (SEQ ID NO: 2473) | (SEQ ID NO: |
| (16BLM) | 2472) | | 2474 |
| | Chothia numbering scheme | | |
| | CDR1 | CDR2 | CDR3 |
| VH W33D | GYTFTSY | DPQSGG | WDYGGYFDV |
| (16BLM) | (SEQ ID NO: | (SEQ ID NO: 2476) | (SEQ ID NO: |
| | 2475) | | 2477) |
| VL T30Y R53V | RASQDIYNYLN | YTSVLET | QQGDTLPWT |
| H55E S56T | (SEQ ID NO: | (SEQ ID NO: 2479) | (SEQ ID NO: |
| (16BLM) | 2478) | | 2480) |
| | ABM numbering scheme | | |
| | CDR1 | CDR2 | CDR3 |
| VH W33D | GYTFTSYDMH | RIDPQSGGIK | WDYGGYFDV |
| (16BLM) | (SEQ ID NO: | (SEQ ID NO: 2482) | (SEQ ID NO: |
| | 2481) | | 2483) |
| VL T30Y R53V | RASQDIYNYLN | YTSVLET | QQGDTLPWT |
| H55E S56T | (SEQ ID NO: | (SEQ ID NO: 2485) | (SEQ ID NO: |
| (16BLM) | 2484) | | 2486) |
| | IMGT numbering scheme | | |
| | CDR1 | CDR2 | CDR3 |
| VH W33D | GYTFTSYD | IDPQSGGI | ARWDYGGYFDV |
| (16BLM) | (SEQ ID NO: | (SEQ ID NO: 2488) | (SEQ ID NO: |
| | 2487) | | 2489) |
| VL T30Y R53V | QDIYNY | YTS | QQGDTLPWT |
| H55E S56T | (SEQ ID NO: | (SEQ ID NO: 2491) | (SEQ ID NO: |
| (16BLM) | 2490) | | 2492) |
| | Kabat numbering scheme | | |
| V-region ID | CDR1 | CDR2 | CDR3 |
| VH W33D | SYDMH | RIDPQSGGIKYAQKFQG | WDYGGYFDV |
| (017BLM) | (SEQ ID NO: | (SEQ ID NO: 2494) | (SEQ ID NO: |
| | 2493) | | 2495) |
| VL T30Y T93E | RASQDIYNYLN | YTSRLET | QQGDELPWT |
| H55E S56T | (SEQ ID NO: | (SEQ ID NO: 2497) | (SEQ ID NO: |
| (017BLM) | 2496) | | 2498) |
| | Chothia numbering scheme | | |
| | CDR1 | CDR2 | CDR3 |
| VH W33D | GYTFTSY | DPQSGG | WDYGGYFDV |
| (017BLM) | (SEQ ID NO: | (SEQ ID NO: 2500) | (SEQ ID NO: |
| | 2499) | | 2501) |
| VL T30Y T93E | RASQDIYNYLN | YTSRLET | QQGDELPWT |
| H55E S56T | (SEQ ID NO: | (SEQ ID NO: 2503) | (SEQ ID NO: |
| (017BLM) | 2502) | | 2504) |
| | ABM numbering scheme | | |
| | CDR1 | CDR2 | CDR3 |
| VH W33D | GYTFTSYDMH | RIDPQSGGIK | WDYGGYFDV |
| (017BLM) | (SEQ ID NO: | (SEQ ID NO: 2506) | (SEQ ID NO: |
| | 2505) | | 2507) |
| VL T30Y T93E | RASQDIYNYLN | YTSRLET | QQGDELPWT |
| H55E S56T | (SEQ ID NO: | (SEQ ID NO: 2509) | (SEQ ID NO: |
| (017BLM) | 2508) | | 2510) |
| | IMGT numbering scheme | | |
| | CDR1 | CDR2 | CDR3 |
| VH W33D | GYTFTSYD | IDPQSGGI | ARWDYGGYFDV |
| (017BLM) | (SEQ ID NO: | (SEQ ID NO: 2512) | (SEQ ID NO: |
| | 2511) | | 2513) |
| VL T30Y T93E | QDIYNY | YTS | QQGDELPWT |
| H55E S56T | (SEQ ID NO: | (SEQ ID NO: 2515) | (SEQ ID NO: |
| (017BLM) | 2514) | | 2516) |
| | Kabat numbering scheme | | |
| V-region ID | CDR1 | CDR2 | CDR3 |
| VH W33D W99Y | SYDMH | RIDPQSGGIKYAQKFQG | YDHGGYFDV |
| Y101H (18BLM) | (SEQ ID NO: | (SEQ ID NO: 2518) | (SEQ ID NO: |
| | 2517) | | 2519) |
| VL T30Y H55E | RASQDIYNYLN | YTSRLET | QQGDTLPWT |
| S56T (18BLM) | (SEQ ID NO: | (SEQ ID NO: 2521) | (SEQ ID NO: |
| | 2520) | | 2522) |
| | Chothia numbering scheme | | |
| | CDR1 | CDR2 | CDR3 |
| VH W33D W99Y | GYTFTSY | DPQSGG | YDHGGYFDV |
| Y101H (18BLM) | (SEQ ID NO: | (SEQ ID NO: 2524) | (SEQ ID NO: |
| | 2523) | | 2525) |
| VL T30Y H55E | RASQDIYNYLN | YTSRLET | QQGDTLPWT |
| S56T (18BLM) | (SEQ ID NO: | (SEQ ID NO: 2527) | (SEQ ID NO: |
| | 2526) | | 2528) |
| | ABM numbering scheme | | |
| | CDR1 | CDR2 | CDR3 |
| VH W33D W99Y | GYTFTSYDMH | RIDPQSGGIK | YDHGGYFDV |
| Y101H (18BLM) | (SEQ ID NO: | (SEQ ID NO: 2530) | (SEQ ID NO: |
| | 2529) | | 2531) |
| VL T30Y H55E | RASQDIYNYLN | YTSRLET | QQGDTLPWT |
| S56T (18BLM) | (SEQ ID NO: | (SEQ ID NO: 2533) | (SEQ ID NO: |
| | 2532) | | 2534) |
| | IMGT numbering scheme | | |
| | CDR1 | CDR2 | CDR3 |
| VH W33D W99Y | GYTFTSYD | IDPQSGGI | ARYDHGGYFDV |
| Y101H (18BLM) | (SEQ ID NO: | (SEQ ID NO: 2536) | (SEQ ID NO: |
| | 2535) | | 2537) |
| VL T30Y H55E | QDIYNY | YTS | QQGDTLPWT |
| S56T (18BLM) | (SEQ ID NO: | (SEQ ID NO: 2539) | (SEQ ID NO: |
| | 2538) | | 2540) |
| | Kabat numbering scheme | | |
| V-region ID | CDR1 | CDR2 | CDR3 |
| VH W33D W99Y | SYDMH | RIDPQSGGIKYAQKFQG | YDHGGYFDV |
| Y101H (19BLM) | (SEQ ID NO: | (SEQ ID NO: 2542) | (SEQ ID NO: |
| | 2541) | | 2543) |
| VL T30Y R53Y | RASQDIYNYLN | YTSYLET | QQGDTLPWT |
| H55E S56T | (SEQ ID NO: | (SEQ ID NO: 2545) | (SEQ ID NO: |
| (19BLM) | 2544) | | 2546) |
| | Chothia numbering scheme | | |
| | CDR1 | CDR2 | CDR3 |
| VH W33D W99Y | GYTFTSY | DPQSGG | YDHGGYFDV |
| Y101H (19BLM) | (SEQ ID NO: | (SEQ ID NO: 2548) | (SEQ ID NO: |
| | 2547) | | 2549) |
| VL T30Y R53Y | RASQDIYNYLN | YTSYLET | QQGDTLPWT |
| H55E S56T | (SEQ ID NO: | (SEQ ID NO: 2551) | (SEQ ID NO: |
| (19BLM) | 2550) | | 2552) |
| | ABM numbering scheme | | |
| | CDR1 | CDR2 | CDR3 |
| VH W33D W99Y | GYTFTSYDMH | RIDPQSGGIK | YDHGGYFDV |
| Y101H (19BLM) | (SEQ ID NO: | (SEQ ID NO: 2554) | (SEQ ID NO: |
| | 2553) | | 2555) |
| VL T30Y R53Y | RASQDIYNYLN | YTSYLET | QQGDTLPWT |
| H55E S56T | (SEQ ID NO: | (SEQ ID NO: 2557) | (SEQ ID NO: |
| (19BLM) | 2556) | | 2558) |
| | IMGT numbering scheme | | |
| | CDR1 | CDR2 | CDR3 |
| VH W33D W99Y | GYTFTSYD | IDPQSGGI | ARYDHGGYFDV |
| Y101H (19BLM) | (SEQ ID NO: | (SEQ ID NO: 2560) | (SEQ ID NO: |
| | 2559) | | 2561) |
| VL T30Y R53Y | QDIYNY | YTS | QQGDTLPWT |
| H55E S56T | (SEQ ID NO: | (SEQ ID NO: 2563) | (SEQ ID NO: |
| (19BLM) | 2562) | | 2564) |
| | Kabat numbering scheme | | |
| V-region ID | CDR1 | CDR2 | CDR3 |
| VH W33D I58E | SYDMH | RIDPQSGGEKYAQKFQG | YDYGGYFDV |
| W99Y (20BLM) | (SEQ ID NO: | (SEQ ID NO: 2566) | (SEQ ID NO: |
| | 2565) | | 2567) |
| VL T30Y H55E | RASQDIYNYLN | YTSRLET | QQGDTLPWT |
| S56T (20BLM) | (SEQ ID NO: | (SEQ ID NO: 2569) | (SEQ ID NO: |
| | 2568) | | 2570) |
| | Chothia numbering scheme | | |
| | CDR1 | CDR2 | CDR3 |
| VH W33D I58E | GYTFTSY | DPQSGG | YDYGGYFDV |
| W99Y (20BLM) | (SEQ ID NO: | (SEQ ID NO: 2572) | (SEQ ID NO: |
| | 2571) | | 2573) |
| VL T30Y H55E | RASQDIYNYLN | YTSRLET | QQGDTLPWT |
| S56T (20BLM) | (SEQ ID NO: | (SEQ ID NO: 2575) | (SEQ ID NO: |
| | 2574) | | 2576) |
| | ABM numbering scheme | | |
| | CDR1 | CDR2 | CDR3 |
| VH W33D I58E | GYTFTSYDMH | RIDPQSGGEK | YDYGGYFDV |
| W99Y (20BLM) | (SEQ ID NO: | (SEQ ID NO: 2578) | (SEQ ID NO: |
| | 2577) | | 2579) |
| VL T30Y H55E | RASQDIYNYLN | YTSRLET | QQGDTLPWT |
| S56T (20BLM) | (SEQ ID NO: | (SEQ ID NO: 2581) | (SEQ ID NO: |
| | 2580) | | 2582) |
| | IMGT numbering scheme | | |
| | CDR1 | CDR2 | CDR3 |
| VH W33D I58E | GYTFTSYD | IDPQSGGE | ARYDYGGYFDV |
| W99Y (20BLM) | (SEQ ID NO: | (SEQ ID NO: 2584) | (SEQ ID NO: |
| | 2583) | | 2585) |
| VL T30Y H55E | QDIYNY | YTS | QQGDTLPWT |
| S56T (20BLM) | (SEQ ID NO: | (SEQ ID NO: 2587) | (SEQ ID NO: |
| | 2586) | | 2588) |

TABLE 45B
VH and VL amino acid sequences for the 15 selected affinity maturated humanized antibodies

| Lot ID & | | VH | | VL |
|---|---|---|---|---|
| Affinity | VH amino acid sequence* | Mutations | VL amino acid sequence** | Mutations |
| 06BLM | EVQLVQSGAEVKKPGASVKVSCKASGYTFT | W33D | DIQMTQSPSSLSASVGDRVTITCRASQDIYNYLNWYQQKPG | T30Y |
| | SYDMHWVRQAPGQGLEWMGRIDPQSGGIRY | K59R | KAVKLLIYYTSILETGVPSRFSGSGSGTDYTLTISSLQPED | R53I |
| | AQKFQGRATLTVDTSTSTAYMELSRLRSDD | Y104Q | FATYFCQQGDTLPWTFGQGTKLEIK | H55E |
| | TAVYYCARWDYGGQFDVWGQGTLVTVSS | | (SEQ ID NO: 2604) | S56T |
| | (SEQ ID NO: 2589) | | | |
| 07BLM | EVQLVQSGAEVKKPGASVKVSCKASGYTFT | W33D | DIQMTQSPSSLSASVGDRVTITCRASQDIYSYLNWYQQKPG | T30Y |
| | SYDMHWVRQAPGQGLEWMGRIDPQSGGIRY | K59R | KAVKLLIYYTSNLETGVPSRFSGSGSGTDYTLTISSLQPED | N31S |
| | AQKFQGRATLTVDTSTSTAYMELSRLRSDD | | FATYFCQQGDTLPWTFGQGTKLEIK | R53N |
| | TAVYYCARWDYGGYFDVWGQGTLVTVSS | | (SEQ ID NO: 2605) | H55E |
| | (SEQ ID NO: 2590) | | | S56T |
| 08BLM | EVQLVQSGAEVKKPGASVKVSCKASGYTFT | W33D | DIQMTQSPSSLSASVGDRVTITCRASQDIYNYLNWYQQKPG | T30Y |
| | SYDMHWVRQAPGQGLEWMGRIDPQSGGTKY | I58T | KAVKLLIYYTSGLETGVPSRFSGSGSGTDYTLTISSLQPED | R53G |
| | AQKFQGRATLTVDTSTSTAYMELSRLRSDD | Y104Q | FATYFCQQGDTLPWTFGQGTKLEIK | H55E |
| | TAVYYCARWDYGGQFDVWGQGTLVTVSS | | (SEQ ID NO: 2606) | S56T |
| | (SEQ ID NO: 2591) | | | |
| 09BLM | EVQLVQSGAEVKKPGASVKVSCKASGYTFT | W33D | DIQMTQSPSSLSASVGDRVTITCRASQDIFNYLNWYQQKPG | T30F |
| | SYDMHWVRQAPGQGLEWMGRIDPISGGIKY | Q54I | KAVKLLIYYTSHLETGVPSRFSGSGSGTDYTLTISSLQPED | R53H |
| | AQKFQGRATLTVDTSTSTAYMELSRLRSDD | | FATYFCQQGDTLPWTFGQGTKLEIK | H55E |
| | TAVYYCARWDYGGYFDVWGQGTLVTVSS | | (SEQ ID NO: 2607) | S56T |
| | (SEQ ID NO: 2592) | | | |
| 10BLM | EVQLVQSGAEVKKPGASVKVSCKASGYTFT | W33D | DIQMTQSPSSLSASVGDRVTITCRASQDIYNYLNWYQQKPG | T30Y |
| | SYDMHWVRQAPGQGLEWMGRIDPQSGGTKY | I58T | KAVKLLIYYTSVLETGVPSRFSGSGSGTDYTLTISSLQPED | R53V |
| | AQKFQGRATLTVDTSTSTAYMELSRLRSDD | | FATYFCQQGDTLPWTFGQGTKLEIK | H55E |
| | TAVYYCARWDYGGYFDVWGQGTLVTVSS | | (SEQ ID NO: 2608) | S56T |
| | (SEQ ID NO: 2593) | | | |
| 11BLM | EVQLVQSGAEVKKPGASVKVSCKASGYTFT | W33D | DIQMTQSPSSLSASVGDRVTITCRASQDIYNYLNWYQQKPG | T30Y |
| | SYDMHWVRQAPGQGLEWMGRIDPQSGGIRY | K59R | KAVKLLIYYTSVLETGVPSRFSGSGSGTDYTLTISSLQPED | R53V |
| | AQKFQGRATLTVDTSTSTAYMELSRLRSDD | | FATYFCQQGDTLPWTFGQGTKLEIK | H55E |
| | TAVYYCARWDYGGYFDVWGQGTLVTVSS | | (SEQ ID NO: 2609) | S56T |
| | (SEQ ID NO: 2594) | | | |
| 12BLM | EVQLVQSGAEVKKPGASVKVSCKASGYTFT | W33D | DIQMTQSPSSLSASVGDRVTITCRASQDIYNYLNWYQQKPG | T30Y |
| | SYDMHWVRQAPGQGLEWMGRIDPQSGGVKY | I58V | KAVKLLIYYTSVLETGVPSRFSGSGSGTDYTLTISSLQPED | R53V |
| | AQKFQGRATLTVDTSTSTAYMELSRLRSDD | | FATYFCQQGDELPWTFGQGTKLEIK | T93E |
| | TAVYYCARWDYGGYFDVWGQGTLVTVSS | | (SEQ ID NO: 2610) | H55E |
| | (SEQ ID NO: 2595) | | | S56T |
| 13BLM | EVQLVQSGAEVKKPGASVKVSCKASGYTFT | W33D | DIQMTQSPSSLSASVGDRVTITCRASQDIYNYLNWYQQKPG | T30Y |
| | SYDMHWVRQAPGQGLEWMGRIDPQTGDIKY | S55T | KAVKLLIYYTSGLETGVPSRFSGSGSGTDYTLTISSLQPED | R53G |
| | AQKFQGRATLTVDTSTSTAYMELSRLRSDD | G57D | FATYFCQQGDTLPWTFGQGTKLEIK | H55E |
| | TAVYYCARWDYGGQFDVWGQGTLVTVSS | Y104Q | (SEQ ID NO: 2611) | S56T |
| | (SEQ ID NO: 2596) | | | |
| 14BLM | EVQLVQSGAEVKKPGASVKVSCKASGYTFT | W33D | DIQMTQSPSSLSASVGDRVTITCRASQDIYNYLNWYQQKPG | T30Y |
| | SYDTHWVRQAPGQGLEWMGRIDPQSGGIKY | M34T | KAVKLLIYYTSYLETGVPSRFSGSGSGTDYTLTISSLQPED | R53Y |
| | AQKFQGRATLTVDTSTSTAYMELSRLRSDD | | FATYFCQQGDTLPWTFGQGTKLEIK | H55E |
| | TAVYYCARWDYGGYFDVWGQGTLVTVSS | | (SEQ ID NO: 2612) | S56T |
| | (SEQ ID NO: 2597) | | | |
| 15BLM | EVQLVQSGAEVKKPGASVKVSCKASGYTFT | W33D | DIQMTQSPSSLSASVGDRVTITCRASQDIYNYLNWYQQKPG | T30Y |
| | SYDMHWVRQAPGQGLEWMGRIDPQSGGIKY | | KAVKLLIYYTSRLETGVPSRFSGSGSGTDYTLTISSLQPED | H55E |
| | AQKFQGRATLTVDTSTSTAYMELSRLRSDD | | FATYFCQQGDTLPWTFGQGTKLEIK | S56T |
| | TAVYYCARWDYGGYFDVWGQGTLVTVSS | | (SEQ ID NO: 2613) | |
| | (SEQ ID NO: 2598) | | | |
| 16BLM | EVQLVQSGAEVKKPGASVKVSCKASGYTFT | W33D | DIQMTQSPSSLSASVGDRVTITCRASQDIYNYLNWYQQKPG | T30Y |
| | SYDMHWVRQAPGQGLEWMGRIDPQSGGIKY | | KAVKLLIYYTSVLETGVPSRFSGSGSGTDYTLTISSLQPED | R53V |
| | AQKFQGRATLTVDTSTSTAYMELSRLRSDD | | FATYFCQQGDTLPWTFGQGTKLEIK | H55E |
| | TAVYYCARWDYGGYFDVWGQGTLVTVSS | | (SEQ ID NO: 2614) | S56T |
| | (SEQ ID NO: 2599) | | | |
| 17BLM | EVQLVQSGAEVKKPGASVKVSCKASGYTFT | W33D | DIQMTQSPSSLSASVGDRVTITCRASQDIYNYLNWYQQKPG | T30Y |
| | SYDMHWVRQAPGQGLEWMGRIDPQSGGIKY | | KAVKLLIYYTSRLETGVPSRFSGSGSGTDYTLTISSLQPED | T93E |
| | AQKFQGRATLTVDTSTSTAYMELSRLRSDD | | FATYFCQQGDELPWTFGQGTKLEIK | H55E |
| | TAVYYCARWDYGGYFDVWGQGTLVTVSS | | (SEQ ID NO: 2615) | S56T |
| | (SEQ ID NO: 2600) | | | |
| 18BLM | EVQLVQSGAEVKKPGASVKVSCKASGYTFT | W33D | DIQMTQSPSSLSASVGDRVTITCRASQDIYNYLNWYQQKPG | T30Y |
| | SYDMHWVRQAPGQGLEWMGRIDPQSGGIKY | W99Y | KAVKLLIYYTSRLETGVPSRFSGSGSGTDYTLTISSLQPED | H55E |
| | AQKFQGRATLTVDTSTSTAYMELSRLRSDD | Y101H | FATYFCQQGDTLPWTFGQGTKLEIK | S56T |
| | TAVYYCARYDHGGYFDVWGQGTLVTVSS | | (SEQ ID NO: 2616) | |
| | (SEQ ID NO: 2601) | | | |
| 19BLM | EVQLVQSGAEVKKPGASVKVSCKASGYTFT | W33D | DIQMTQSPSSLSASVGDRVTITCRASQDIYNYLNWYQQKPG | T30Y |
| | SYDMHWVRQAPGQGLEWMGRIDPQSGGIKY | W99Y | KAVKLLIYYTSYLETGVPSRFSGSGSGTDYTLTISSLQPED | R53Y |
| | AQKFQGRATLTVDTSTSTAYMELSRLRSDD | Y101H | FATYFCQQGDTLPWTFGQGTKLEIK | H55E |
| | TAVYYCARYDHGGYFDVWGQGTLVTVSS | | (SEQ ID NO: 2617) | S56T |
| | (SEQ ID NO: 2602) | | | |
| 20BLM | EVQLVQSGAEVKKPGASVKVSCKASGYTFT | W33D | DIQMTQSPSSLSASVGDRVTITCRASQDIYNYLNWYQQKPG | S56T |
| | SYDMHWVRQAPGQGLEWMGRIDPQSGGEKY | I58E | KAVKLLIYYTSRLETGVPSRFSGSGSGTDYTLTISSLQPED | T30Y |
| | AQKFQGRATLTVDTSTSTAYMELSRLRSDD | W99Y | FATYFCQQGDTLPWTFGQGTKLEIK | H55E |
| | TAVYYCARYDYGGYFDVWGQGTLVTVSSAS | | (SEQ ID NO: 2618) | |
| | (SEQ ID NO: 2603) | | | |

TABLE 45C
Amino acid sequences for the 15 selected affinity maturation antibody clone heavy chains and light
chains

| Lot ID | | | VH | | VL |
|---|---|---|---|---|---|
| & | | | Muta- | | Muta- |
| Affinity | ID | Heavy chain amino acid sequence* | tions | Light chain amino acid sequence ** | tions |
| 06BLM | 12hr- | EVQLVQSGAEVKKPGASVKVSCKASGYTFTSYDM | W33D | DIQMTQSPSSLSASVGDRVTITCRASQDIYNYLNWYQQK | T30Y |
| (4 | P1-7 | HWVRQAPGQGLEWMGRIDPQSGGIRYAQKFQGRA | K59R | PGKAVKLLIYYTSILETGVPSRFSGSGSGTDYTLTISSL | R53I |
| pM) | | TLTVDTSTSTAYMELSRLRSDDTAVYYCARWDYG | Y104Q | QPEDFATYFCQQGDTLPWTFGQGTKLEIK | H55E |
| | | GQFDVWGQGTLVTVSSASTKGPSVFPLAPSSKST | | (SEQ ID NO: 2634) | S56T |
| | | SGGTAALGCLVKDYFPEPVTVSWNSGALTSGVHT | | | |
| | | FPAVLQSSGLYSLSSVVTVPSSSLGTQTYICNVN | | | |
| | | HKPSNTKVDKKVEPKSCDKTHTCPPCPAPEaaGG | | | |
| | | PSVFLFPPKPKDTLMISRTPEVTCVVVsVSHEDP | | | |
| | | EVKFNWYVDGVEVHNAKTKPREEQYNSTYRVVSV | | | |
| | | LTVLHQDWLNGKEYKCKVSNKALPAPIEKTISKA | | | |
| | | KGQPREPQVYTLPPSRDELTKNQVSLTCLVKGFY | | | |
| | | PSDIAVEWESNGQPENNYKTTPPVLDSDGSFFLY | | | |
| | | SKLTVDKSRWQQGNVFSCSVMHEALHNHYTQKSL | | | |
| | | SLSPGK | | | |
| | | (SEQ ID NO: 2619) | | | |
| 07BLM | 12hr- | EVQLVQSGAEVKKPGASVKVSCKASGYTFTSYDM | W33D | DIQMTQSPSSLSASVGDRVTITCRASQDIYSYLNWYQQK | T30Y |
| (59 | P1-13 | HWVRQAPGQGLEWMGRIDPQSGGIRYAQKFQGRA | K59R | PGKAVKLLIYYTSNLETGVPSRFSGSGSGTDYTLTISSL | N31S |
| pM) | | TLTVDTSTSTAYMELSRLRSDDTAVYYCARWDYG | | QPEDFATYFCQQGDTLPWTFGQGTKLEIKRTVAAPSVFI | R53N |
| | | GYFDVWGQGTLVTVSSASTKGPSVFPLAPSSKST | | FPPSDEQLKSGTASVVCLLNNFYPREAKVQWKVDNALQS | H55E |
| | | SGGTAALGCLVKDYFPEPVTVSWNSGALTSGVHT | | GNSQESVTEQDSKDSTYSLSSTLTLSKADYEKHKVYACE | S56T |
| | | FPAVLQSSGLYSLSSVVTVPSSSLGTQTYICNVN | | VTHQGLSSPVTKSFNRGEC | |
| | | HKPSNTKVDKKVEPKSCDKTHTCPPCPAPEaaGG | | (SEQ ID NO: 2635) | |
| | | PSVFLFPPKPKDTLMISRTPEVTCVVVsVSHEDP | | | |
| | | EVKFNWYVDGVEVHNAKTKPREEQYNSTYRVVSV | | | |
| | | LTVLHQDWLNGKEYKCKVSNKALPAPIEKTISKA | | | |
| | | KGQPREPQVYTLPPSRDELTKNQVSLTCLVKGFY | | | |
| | | PSDIAVEWESNGQPENNYKTTPPVLDSDGSFFLY | | | |
| | | SKLTVDKSRWQQGNVFSCSVMHEALHNHYTQKSL | | | |
| | | SLSPGK | | | |
| | | (SEQ ID NO: 2620) | | | |
| 08BLM | 12hr- | EVQLVQSGAEVKKPGASVKVSCKASGYTFTSYDM | W33D | DIQMTQSPSSLSASVGDRVTITCRASQDIYNYLNWYQQK | T30Y |
| 16 | P1-45 | HWVRQAPGQGLEWMGRIDPQSGGTKYAQKFQGRA | I58T | PGKAVKLLIYYTSGLETGVPSRFSGSGSGTDYTLTISSL | R53G |
| pM) | | TLTVDTSTSTAYMELSRLRSDDTAVYYCARWDYG | Y104Q | QPEDFATYFCQQGDTLPWTFGQGTKLEIKRTVAAPSVFI | H55E |
| | | GQFDVWGQGTLVTVSSASTKGPSVFPLAPSSKST | | FPPSDEQLKSGTASVVCLLNNFYPREAKVQWKVDNALQS | S56T |
| | | SGGTAALGCLVKDYFPEPVTVSWNSGALTSGVHT | | GNSQESVTEQDSKDSTYSLSSTLTLSKADYEKHKVYACE | |
| | | FPAVLQSSGLYSLSSVVTVPSSSLGTQTYICNVN | | VTHQGLSSPVTKSFNRGEC | |
| | | HKPSNTKVDKKVEPKSCDKTHTCPPCPAPEaaGG | | (SEQ ID NO: 2636) | |
| | | PSVFLFPPKPKDTLMISRTPEVTCVVVsVSHEDP | | | |
| | | EVKFNWYVDGVEVHNAKTKPREEQYNSTYRVVSV | | | |
| | | LTVLHQDWLNGKEYKCKVSNKALPAPIEKTISKA | | | |
| | | KGQPREPQVYTLPPSRDELTKNQVSLTCLVKGFY | | | |
| | | PSDIAVEWESNGQPENNYKTTPPVLDSDGSFFLY | | | |
| | | SKLTVDKSRWQQGNVFSCSVMHEALHNHYTQKSL | | | |
| | | SLSPGK | | | |
| | | (SEQ ID NO: 2621) | | | |
| 09BLM | 12hr- | EVQLVQSGAEVKKPGASVKVSCKASGYTFTSYDM | W33D | DIQMTQSPSSLSASVGDRVTITCRASQDIFNYLNWYQQK | T30F |
| (81 | P1-34 | HWVRQAPGOGLEWMGRIDPISGGIKYAQKFQGRA | Q54I | PGKAVKLLIYYTSHLETGVPSRFSGSGSGTDYTLTISSL | R53H |
| pM) | | TLTVDTSTSTAYMELSRLRSDDTAVYYCARWDYG | | QPEDFATYFCQQGDTLPWTFGQGTKLEIKRTVAAPSVFI | H55E |
| | | GYFDVWGQGTLVTVSSASTKGPSVFPLAPSSKST | | FPPSDEQLKSGTASVVCLLNNFYPREAKVQWKVDNALQS | S56T |
| | | SGGTAALGCLVKDYFPEPVTVSWNSGALTSGVHT | | GNSQESVTEQDSKDSTYSLSSTLTLSKADYEKHKVYACE | |
| | | FPAVLQSSGLYSLSSVVTVPSSSLGTQTYICNVN | | VTHQGLSSPVTKSFNRGEC | |
| | | HKPSNTKVDKKVEPKSCDKTHTCPPCPAPEaaGG | | (SEQ ID NO: 2637) | |
| | | PSVFLFPPKPKDTLMISRTPEVTCVVVsVSHEDP | | | |
| | | EVKFNWYVDGVEVHNAKTKPREEQYNSTYRVVSV | | | |
| | | LTVLHQDWLNGKEYKCKVSNKALPAPIEKTISKA | | | |
| | | KGQPREPQVYTLPPSRDELTKNQVSLTCLVKGFY | | | |
| | | PSDIAVEWESNGQPENNYKTTPPVLDSDGSFFLY | | | |
| | | SKLTVDKSRWQQGNVFSCSVMHEALHNHYTQKSL | | | |
| | | SLSPGK | | | |
| | | (SEQ ID NO: 2622) | | | |
| 10BLM | 2hr- | EVQLVQSGAEVKKPGASVKVSCKASGYTFTSYDM | W33D | DIQMTQSPSSLSASVGDRVTITCRASQDIYNYLNWYQQK | T30Y |
| (53 | P1-8 | HWVRQAPGQGLEWMGRIDPQSGGTKYAQKFQGRA | I58T | PGKAVKLLIYYTSVLETGVPSRFSGSGSGTDYTLTISSL | R53V |
| pM) | | TLTVDTSTSTAYMELSRLRSDDTAVYYCARWDYG | | QPEDFATYFCQQGDTLPWTFGQGTKLEIKRTVAAPSVFI | H55E |
| | | GYFDVWGQGTLVTVSSASTKGPSVFPLAPSSKST | | FPPSDEQLKSGTASVVCLLNNFYPREAKVQWKVDNALQS | S56T |
| | | SGGTAALGCLVKDYFPEPVTVSWNSGALTSGVHT | | GNSQESVTEQDSKDSTYSLSSTLTLSKADYEKHKVYACE | |
| | | FPAVLQSSGLYSLSSVVTVPSSSLGTQTYICNVN | | VTHQGLSSPVTKSFNRGEC | |
| | | HKPSNTKVDKKVEPKSCDKTHTCPPCPAPEaaGG | | (SEQ ID NO: 2638) | |
| | | PSVFLFPPKPKDTLMISRTPEVTCVVVsVSHEDP | | | |
| | | EVKFNWYVDGVEVHNAKTKPREEQYNSTYRVVSV | | | |
| | | LTVLHQDWLNGKEYKCKVSNKALPAPIEKTISKA | | | |
| | | KGQPREPQVYTLPPSRDELTKNQVSLTCLVKGFY | | | |
| | | PSDIAVEWESNGQPENNYKTTPPVLDSDGSFFLY | | | |
| | | SKLTVDKSRWQQGNVFSCSVMHEALHNHYTQKSL | | | |
| | | SLSPGK | | | |
| | | (SEQ ID NO: 2623) | | | |
| 11BLM | 2hr- | EVQLVQSGAEVKKPGASVKVSCKASGYTFTSYDM | W33D | DIQMTQSPSSLSASVGDRVTITCRASQDIYNYLNWYQQK | T30Y |
| (66 | P1-32 | HWVRQAPGQGLEWMGRIDPQSGGIRYAQKFQGRA | K59R | PGKAVKLLIYYTSVLETGVPSRFSGSGSGTDYTLTISSL | R53V |
| pM) | | TLTVDTSTSTAYMELSRLRSDDTAVYYCARWDYG | | QPEDFATYFCQQGDTLPWTFGQGTKLEIKRTVAAPSVFI | H55E |
| | | GYFDVWGQGTLVTVSSASTKGPSVFPLAPSSKST | | FPPSDEQLKSGTASVVCLLNNFYPREAKVQWKVDNALQS | S56T |
| | | SGGTAALGCLVKDYFPEPVTVSWNSGALTSGVHT | | GNSQESVTEQDSKDSTYSLSSTLTLSKADYEKHKVYACE | |
| | | FPAVLQSSGLYSLSSVVTVPSSSLGTQTYICNVN | | VTHQGLSSPVTKSFNRGEC | |
| | | HKPSNTKVDKKVEPKSCDKTHTCPPCPAPEaaGG | | (SEQ ID NO: 2639) | |
| | | PSVFLFPPKPKDTLMISRTPEVTCVVVsVSHEDP | | | |
| | | EVKFNWYVDGVEVHNAKTKPREEQYNSTYRVVSV | | | |
| | | LTVLHQDWLNGKEYKCKVSNKALPAPIEKTISKA | | | |
| | | KGQPREPQVYTLPPSRDELTKNQVSLTCLVKGFY | | | |
| | | PSDIAVEWESNGQPENNYKTTPPVLDSDGSFFLY | | | |
| | | SKLTVDKSRWQQGNVFSCSVMHEALHNHYTQKSL | | | |
| | | SLSPGK | | | |
| | | (SEQ ID NO: 2624) | | | |
| 12BLM | 2hr- | EVQLVQSGAEVKKPGASVKVSCKASGYTFTSYDM | W33D | DIQMTQSPSSLSASVGDRVTITCRASQDIYNYLNWYQQK | T30Y |
| (24 | P1-47 | HWVRQAPGQGLEWMGRIDPQSGGVKYAQKFQGRA | I58V | PGKAVKLLIYYTSVLETGVPSRFSGSGSGTDYTLTISSL | R53V |
| PM) | | TLTVDTSTSTAYMELSRLRSDDTAVYYCARWDYG | | QPEDFATYFCQQGDELPWTFGQGTKLEIKRTVAAPSVFI | T93E |
| | | GYFDVWGQGTLVTVSSASTKGPSVFPLAPSSKST | | FPPSDEQLKSGTASVVCLLNNFYPREAKVQWKVDNALQS | H55E |
| | | SGGTAALGCLVKDYFPEPVTVSWNSGALTSGVHT | | GNSQESVTEQDSKDSTYSLSSTLTLSKADYEKHKVYACE | S56T |
| | | FPAVLQSSGLYSLSSVVTVPSSSLGTQTYICNVN | | VTHQGLSSPVTKSFNRGEC | |
| | | HKPSNTKVDKKVEPKSCDKTHTCPPCPAPEaaGG | | (SEQ ID NO: 2640) | |
| | | PSVFLFPPKPKDTLMISRTPEVTCVVVsVSHEDP | | | |
| | | EVKFNWYVDGVEVHNAKTKPREEQYNSTYRVVSV | | | |
| | | LTVLHQDWLNGKEYKCKVSNKALPAPIEKTISKA | | | |
| | | KGQPREPQVYTLPPSRDELTKNQVSLTCLVKGFY | | | |
| | | PSDIAVEWESNGQPENNYKTTPPVLDSDGSFFLY | | | |
| | | SKLTVDKSRWQQGNVFSCSVMHEALHNHYTQKSL | | | |
| | | SLSPGK | | | |
| | | (SEQ ID NO: 2625) | | | |
| 13BLM | 2hr- | EVQLVQSGAEVKKPGASVKVSCKASGYTFTSYDM | W33D | DIQMTQSPSSLSASVGDRVTITCRASQDIYNYLNWYQQK | T30Y |
| (13 | P1-54 | HWVRQAPGQGLEWMGRIDPQTGDIKYAQKFQGRA | G57D | PGKAVKLLIYYTSGLETGVPSRFSGSGSGTDYTLTISSL | R53G |
| pM) | | TLTVDTSTSTAYMELSRLRSDDTAVYYCARWDYG | Y104Q | QPEDFATYFCQQGDTLPWTFGQGTKLEIKRTVAAPSVFI | H55E |
| | | GQFDVWGQGTLVTVSSASTKGPSVFPLAPSSKST | S55T | FPPSDEQLKSGTASVVCLLNNFYPREAKVQWKVDNALQS | S56T |
| | | SGGTAALGCLVKDYFPEPVTVSWNSGALTSGVHT | | GNSQESVTEQDSKDSTYSLSSTLTLSKADYEKHKVYACE | |
| | | FPAVLQSSGLYSLSSVVTVPSSSLGTQTYICNVN | | VTHQGLSSPVTKSFNRGEC | |
| | | HKPSNTKVDKKVEPKSCDKTHTCPPCPAPEaaGG | | (SEQ ID NO: 2641) | |
| | | PSVFLFPPKPKDTLMISRTPEVTCVVVsVSHEDP | | | |
| | | EVKFNWYVDGVEVHNAKTKPREEQYNSTYRVVSV | | | |
| | | LTVLHQDWLNGKEYKCKVSNKALPAPIEKTISKA | | | |
| | | KGQPREPQVYTLPPSRDELTKNQVSLTCLVKGFY | | | |
| | | PSDIAVEWESNGQPENNYKTTPPVLDSDGSFFLY | | | |
| | | SKLTVDKSRWQQGNVFSCSVMHEALHNHYTQKSL | | | |
| | | SLSPGK | | | |
| | | (SEQ ID NO: 2626) | | | |
| 14BLM | 2hr- | EVQLVQSGAEVKKPGASVKVSCKASGYTFTSYDT | W33D | DIQMTQSPSSLSASVGDRVTITCRASQDIYNYLNWYQQK | T30Y |
| (264 | P1-84 | HWVRQAPGQGLEWMGRIDPQSGGIKYAQKFQGRA | M34T | PGKAVKLLIYYTSYLETGVPSRFSGSGSGTDYTLTISSL | R53Y |
| pM) | | TLTVDTSTSTAYMELSRLRSDDTAVYYCARWDYG | | QPEDFATYFCQQGDTLPWTFGQGTKLEIKRTVAAPSVFI | H55E |
| | | GYFDVWGQGTLVTVSSASTKGPSVFPLAPSSKST | | FPPSDEQLKSGTASVVCLLNNFYPREAKVQWKVDNALQS | S56T |
| | | SGGTAALGCLVKDYFPEPVTVSWNSGALTSGVHT | | GNSQESVTEQDSKDSTYSLSSTLTLSKADYEKHKVYACE | |
| | | FPAVLQSSGLYSLSSVVTVPSSSLGTQTYICNVN | | VTHQGLSSPVTKSFNRGEC | |
| | | HKPSNTKVDKKVEPKSCDKTHTCPPCPAPEaaGG | | (SEQ ID NO: 2642) | |
| | | PSVFLFPPKPKDTLMISRTPEVTCVVVsVSHEDP | | | |
| | | EVKFNWYVDGVEVHNAKTKPREEQYNSTYRVVSV | | | |
| | | LTVLHQDWLNGKEYKCKVSNKALPAPIEKTISKA | | | |
| | | KGQPREPQVYTLPPSRDELTKNQVSLTCLVKGFY | | | |
| | | PSDIAVEWESNGQPENNYKTTPPVLDSDGSFFLY | | | |
| | | SKLTVDKSRWQQGNVFSCSVMHEALHNHYTQKSL | | | |
| | | SLSPGK | | | |
| | | (SEQ ID NO: 2627) | | | |
| 15BLM | 2hr- | EVQLVQSGAEVKKPGASVKVSCKASGYTFTSYDM | W33D | DIQMTQSPSSLSASVGDRVTITCRASQDIYNYLNWYQQK | T30Y |
| (297 | P1-85 | HWVRQAPGQGLEWMGRIDPQSGGIKYAQKFQGRA | | PGKAVKLLIYYTSRLETGVPSRFSGSGSGTDYTLTISSL | H55E |
| pM) | | TLTVDTSTSTAYMELSRLRSDDTAVYYCARWDYG | | QPEDFATYFCQQGDTLPWTFGQGTKLEIKRTVAAPSVFI | S56T |
| | | GYFDVWGQGTLVTVSSASTKGPSVFPLAPSSKST | | FPPSDEQLKSGTASVVCLLNNFYPREAKVQWKVDNALQS | |
| | | SGGTAALGCLVKDYFPEPVTVSWNSGALTSGVHT | | GNSQESVTEQDSKDSTYSLSSTLTLSKADYEKHKVYACE | |
| | | FPAVLQSSGLYSLSSVVTVPSSSLGTQTYICNVN | | VTHQGLSSPVTKSFNRGEC | |
| | | HKPSNTKVDKKVEPKSCDKTHTCPPCPAPEaaGG | | (SEQ ID NO: 2643) | |
| | | PSVFLFPPKPKDTLMISRTPEVTCVVVsVSHEDP | | | |
| | | EVKFNWYVDGVEVHNAKTKPREEQYNSTYRVVSV | | | |
| | | LTVLHQDWLNGKEYKCKVSNKALPAPIEKTISKA | | | |
| | | KGQPREPQVYTLPPSRDELTKNQVSLTCLVKGFY | | | |
| | | PSDIAVEWESNGQPENNYKTTPPVLDSDGSFFLY | | | |
| | | SKLTVDKSRWQQGNVFSCSVMHEALHNHYTQKSL | | | |
| | | SLSPGK | | | |
| | | (SEQ ID NO: 2628) | | | |
| 16BLM | 2hr- | EVQLVQSGAEVKKPGASVKVSCKASGYTFTSYDM | W33D | DIQMTQSPSSLSASVGDRVTITCRASQDIYNYLNWYQQK | T30Y |
| (77 | P2-94 | HWVRQAPGOGLEWMGRIDPQSGGIKYAQKFQGRA | | PGKAVKLLIYYTSVLETGVPSRFSGSGSGTDYTLTISSL | R53V |
| pM) | | TLTVDTSTSTAYMELSRLRSDDTAVYYCARWDYG | | QPEDFATYFCQQGDTLPWTFGQGTKLEIKRTVAAPSVFI | H55E |
| | | GYFDVWGQGTLVTVSSASTKGPSVFPLAPSSKST | | FPPSDEQLKSGTASVVCLLNNFYPREAKVQWKVDNALQS | S56T |
| | | SGGTAALGCLVKDYFPEPVTVSWNSGALTSGVHT | | GNSQESVTEQDSKDSTYSLSSTLTLSKADYEKHKVYACE | |
| | | FPAVLQSSGLYSLSSVVTVPSSSLGTQTYICNVN | | VTHQGLSSPVTKSFNRGEC | |
| | | HKPSNTKVDKKVEPKSCDKTHTCPPCPAPEaaGG | | (SEQ ID NO: 2644) | |
| | | PSVFLFPPKPKDTLMISRTPEVTCVVVsVSHEDP | | | |
| | | EVKFNWYVDGVEVHNAKTKPREEQYNSTYRVVSV | | | |
| | | LTVLHQDWLNGKEYKCKVSNKALPAPIEKTISKA | | | |
| | | KGQPREPQVYTLPPSRDELTKNQVSLTCLVKGFY | | | |
| | | PSDIAVEWESNGQPENNYKTTPPVLDSDGSFFLY | | | |
| | | SKLTVDKSRWQQGNVFSCSVMHEALHNHYTQKSL | | | |
| | | SLSPGK | | | |
| | | (SEQ ID NO: 2629) | | | |
| 17BLM | 2hr- | EVQLVQSGAEVKKPGASVKVSCKASGYTFTSYDM | W33D | DIQMTQSPSSLSASVGDRVTITCRASQDIYNYLNWYQQK | T30Y |
| (146 | P2-95 | HWVRQAPGQGLEWMGRIDPQSGGIKYAQKFQGRA | | PGKAVKLLIYYTSRLETGVPSRFSGSGSGTDYTLTISSL | T93E |
| pM) | | TLTVDTSTSTAYMELSRLRSDDTAVYYCARWDYG | | QPEDFATYFCQQGDELPWTFGQGTKLEIKRTVAAPSVFI | H55E |
| | | GYFDVWGQGTLVTVSSASTKGPSVFPLAPSSKST | | FPPSDEQLKSGTASVVCLLNNFYPREAKVQWKVDNALQS | S56T |
| | | SGGTAALGCLVKDYFPEPVTVSWNSGALTSGVHT | | GNSQESVTEQDSKDSTYSLSSTLTLSKADYEKHKVYACE | |
| | | FPAVLQSSGLYSLSSVVTVPSSSLGTQTYICNVN | | VTHQGLSSPVTKSFNRGEC | |
| | | HKPSNTKVDKKVEPKSCDKTHTCPPCPAPEaaGG | | (SEQ ID NO: 2645) | |
| | | PSVFLFPPKPKDTLMISRTPEVTCVVVsVSHEDP | | | |
| | | EVKFNWYVDGVEVHNAKTKPREEQYNSTYRVVSV | | | |
| | | LTVLHQDWLNGKEYKCKVSNKALPAPIEKTISKA | | | |
| | | KGQPREPQVYTLPPSRDELTKNQVSLTCLVKGFY | | | |
| | | PSDIAVEWESNGQPENNYKTTPPVLDSDGSFFLY | | | |
| | | SKLTVDKSRWQQGNVFSCSVMHEALHNHYTQKSL | | | |
| | | SLSPGK | | | |
| | | (SEQ ID NO: 2630) | | | |
| 18BLM | 2hr- | EVQLVQSGAEVKKPGASVKVSCKASGYTFTSYDM | W33D | DIQMTQSPSSLSASVGDRVTITCRASQDIYNYLNWYQQK | T30Y |
| (3737 | P2-11 | HWVRQAPGQGLEWMGRIDPQSGGIKYAQKFQGRA | W99Y | PGKAVKLLIYYTSRLETGVPSRFSGSGSGTDYTLTISSL | H55E |
| pM) | | TLTVDTSTSTAYMELSRLRSDDTAVYYCARYDHG | Y101H | QPEDFATYFCQQGDTLPWTFGQGTKLEIKRTVAAPSVFI | S56T |
| | | GYFDVWGQGTLVTVSSASTKGPSVFPLAPSSKST | | FPPSDEQLKSGTASVVCLLNNFYPREAKVQWKVDNALQS | |
| | | SGGTAALGCLVKDYFPEPVTVSWNSGALTSGVHT | | GNSQESVTEQDSKDSTYSLSSTLTLSKADYEKHKVYACE | |
| | | FPAVLQSSGLYSLSSVVTVPSSSLGTQTYICNVN | | VTHQGLSSPVTKSFNRGEC | |
| | | HKPSNTKVDKKVEPKSCDKTHTCPPCPAPEaaGG | | (SEQ ID NO: 2646) | |
| | | PSVFLFPPKPKDTLMISRTPEVTCVVVsVSHEDP | | | |
| | | EVKFNWYVDGVEVHNAKTKPREEQYNSTYRVVSV | | | |
| | | LTVLHQDWLNGKEYKCKVSNKALPAPIEKTISKA | | | |
| | | KGQPREPQVYTLPPSRDELTKNQVSLTCLVKGFY | | | |
| | | PSDIAVEWESNGQPENNYKTTPPVLDSDGSFFLY | | | |
| | | SKLTVDKSRWQQGNVFSCSVMHEALHNHYTQKSL | | | |
| | | SLSPGK | | | |
| | | (SEQ ID NO: 2631) | | | |
| 19BLM | 2hr- | EVQLVQSGAEVKKPGASVKVSCKASGYTFTSYDM | W33D | DIQMTQSPSSLSASVGDRVTITCRASQDIYNYLNWYQQK | T30Y |
| (961 | P3-16 | HWVRQAPGQGLEWMGRIDPQSGGIKYAQKFQGRA | W99Y | PGKAVKLLIYYTSYLETGVPSRFSGSGSGTDYTLTISSL | R53Y |
| pM) | | TLTVDTSTSTAYMELSRLRSDDTAVYYCARYDHG | Y101H | QPEDFATYFCQQGDTLPWTFGQGTKLEIKRTVAAPSVFI | H55E |
| | | GYFDVWGQGTLVTVSSASTKGPSVFPLAPSSKST | | FPPSDEQLKSGTASVVCLLNNFYPREAKVQWKVDNALQS | S56T |
| | | SGGTAALGCLVKDYFPEPVTVSWNSGALTSGVHT | | GNSQESVTEQDSKDSTYSLSSTLTLSKADYEKHKVYACE | |
| | | FPAVLQSSGLYSLSSVVTVPSSSLGTQTYICNVN | | VTHQGLSSPVTKSFNRGEC | |
| | | HKPSNTKVDKKVEPKSCDKTHTCPPCPAPEaaGG | | (SEQ ID NO: 2647) | |
| | | PSVFLFPPKPKDTLMISRTPEVTCVVVsVSHEDP | | | |
| | | EVKFNWYVDGVEVHNAKTKPREEQYNSTYRVVSV | | | |
| | | LTVLHQDWLNGKEYKCKVSNKALPAPIEKTISKA | | | |
| | | KGQPREPQVYTLPPSRDELTKNQVSLTCLVKGFY | | | |
| | | PSDIAVEWESNGQPENNYKTTPPVLDSDGSFFLY | | | |
| | | SKLTVDKSRWQQGNVFSCSVMHEALHNHYTQKSL | | | |
| | | SLSPGK | | | |
| | | (SEQ ID NO: 2632) | | | |
| 20BLM | 2hr- | EVQLVQSGAEVKKPGASVKVSCKASGYTFTSYDM | W33D | DIQMTQSPSSLSASVGDRVTITCRASQDIYNYLNWYQQK | T30Y |
| (438 | P3-33 | HWVRQAPGQGLEWMGRIDPQSGGEKYAQKFQGRA | I58E | PGKAVKLLIYYTSRLETGVPSRFSGSGSGTDYTLTISSL | H55E |
| pM) | | TLTVDTSTSTAYMELSRLRSDDTAVYYCARYDYG | W99Y | QPEDFATYFCQQGDTLPWTFGQGTKLEIKRTVAAPSVFI | S56T |
| | | GYFDVWGQGTLVTVSSASTKGPSVFPLAPSSKST | | FPPSDEQLKSGTASVVCLLNNFYPREAKVQWKVDNALQS | |
| | | SGGTAALGCLVKDYFPEPVTVSWNSGALTSGVHT | | GNSQESVTEQDSKDSTYSLSSTLTLSKADYEKHKVYACE | |
| | | FPAVLQSSGLYSLSSVVTVPSSSLGTQTYICNVN | | VTHQGLSSPVTKSFNRGEC | |
| | | HKPSNTKVDKKVEPKSCDKTHTCPPCPAPEaaGG | | (SEQ ID NO: 2648) | |
| | | PSVFLFPPKPKDTLMISRTPEVTCVVVsVSHEDP | | | |
| | | EVKFNWYVDGVEVHNAKTKPREEQYNSTYRVVSV | | | |
| | | LTVLHQDWLNGKEYKCKVSNKALPAPIEKTISKA | | | |
| | | KGQPREPQVYTLPPSRDELTKNQVSLTCLVKGFY | | | |
| | | PSDIAVEWESNGQPENNYKTTPPVLDSDGSFFLY | | | |
| | | SKLTVDKSRWQQGNVFSCSVMHEALHNHYTQKSL | | | |
| | | SLSPGK | | | |
| | | (SEQ ID NO: 2633) | | | |

TABLE 45D
Information regarding the antibodies and Fabs used in the Examples

| Tables 45A-C | Examples 20-24 | | Table 49 |
|---|---|---|---|
| Antibody ID | FAb IDs | mAbs IDs | mAbs ID |
| 06BLM | 54BLH | 69BLH | 42BMD |
| 07BLM | 55BLH | 70BLH | 43BMD |
| 08BLM | 56BLH | 71BLH | 44BMD |
| 09BLM | 57BLH | 72BLH | 45BMD |
| 10BLM | 58BLH | 73BLH | 46BMD |
| 11BLM | 59BLH | 74BLH | 47BMD |
| 12BLM | 60BLH | 75BLH | 48BMD |
| 13BLM | 61BLH | 76BLH | 49BMD |
| 14BLM | 62BLH | 77BLH | 50BMD |
| 15BLM | 63BLH | 78BLH | 51BMD |
| 16BLM | 64BLH | 79BLH | 52BMD |
| 17BLM | 65BLH | 80BLH | 53BMD |
| 18BLM | 66BLH | 81BLH | 54BMD |
| 19BLM | 67BLH | 82BLH | 55BMD |
| 20BLM | 68BLH | 83BLH | 56BMD |

TABLE 46
P3U1 functional assay of 15 affinity matured antibodies

| | ELISA | ELISA | | |
|---|---|---|---|---|
| | assay #1* | assay *2 | Average | Standard |
| | EC50 | EC50 | EC50 | Deviation |
| Antibody | (μg/mL) | (μg/mL) | (μg/mL) | (SD) |
| 20E6 | 2.376 | 8.905 | 5.641 | 4.617 |
| parental | | | | |
| 06BLM | 0.1126 | 0.137 | 0.125 | 0.017 |
| 07BLM | 0.03324 | 0.119 | 0.076 | 0.061 |
| 08BLM | 0.05389 | 0.098 | 0.076 | 0.031 |
| 09BLM | 0.0295 | 0.130 | 0.080 | 0.071 |
| 10BLM | 0.03324 | 0.134 | 0.083 | 0.071 |
| 11BLM | 0.05389 | 0.112 | 0.083 | 0.041 |
| 12BLM | 0.0295 | 0.096 | 0.063 | 0.047 |
| 13BLM | 0.07854 | 0.105 | 0.092 | 0.018 |
| 14BLM | 0.1694 | 0.146 | 0.158 | 0.016 |
| 15BLM | 0.2191 | 0.243 | 0.231 | 0.017 |
| 16BLM | 0.08161 | 0.126 | 0.104 | 0.032 |
| 17BLM | 0.03568 | 0.089 | 0.063 | 0.038 |
| 18BLM | 0.09822 | 0.006 | 0.052 | 0.065 |
| 19BLM | 0.1525 | 0.205 | 0.179 | 0.037 |
| 20BLM | 0.05738 | 0.008 | 0.033 | 0.035 |

### Example 17. Binding of LAP/TGFβ1 Antibodies to Tumor Infiltrating Immune Cells

[0820] This example analyzed the binding to tumor Infiltrating immune cells of parental humanized 20E6 antibody and the selected affinity matured humanized antibodies 06BLM, 07BLM, 08BLM, 09BLM, 10BLM, 11BLM, 12BLM, 13BLM, 14BLM, 15BLM, 16BLM, 17BLM, 18BLM, 19BLM, and 20BLM. Fresh human kidney and lung tumors (0.5-1 g) from nine patients were sourced from commercial vendors. Each individual sample was placed in a 100 mm dish and cut into small pieces. The samples were then digested for 20 minutes at 37° C. with 10-20 mL tumor digestion medium consisting of RPMI-1640 (Gibco, Catalog no. 11875-093) supplemented with 100 U/mL of collagenase I (Worthington, Catalog no. 4196) and 400 U/mL of DNAse I (Worthington, Catalog no. 2060). The tumor digest sample was passed through 70 m mesh filter and washed with RPMI-1640 supplemented with 10% fetal bovine serum (FBS; Gibco, Catalog no. 16140-071), 1% penicillin/streptomycin (Gibco, Catalog no. 15140-122) and 1% L-glutamine (Gibco, Catalog no. 25-005-CV) to obtain a single cell suspension. The cells were pelleted by centrifuging at 1300 rpm for 7 minutes at 4° C. and then lysed with 2 mL of ammonium-chloride-potassium lysing solution (Life Technologies, Catalog no. A10492-01) for 5 minutes at room temperature. At the end of the incubation period, the lysed cells were washed with Stain Buffer (BD Biosciences, Catalog no. 554657) and counted using a trypan blue exclusion assay.

[0821] Approximately one million viable cells were aliquoted into appropriate wells of 96-well V bottom deep well block (CoStar/Corning, Catalog no. 3960). The cells were pelleted by centrifuging at 400G for 5 minutes at 4° C. The cell pellets were re-suspended in 100 μL of a blocking buffer mix consisting of stain buffer containing 10% human TruStain FcX block solution (BioLegend, Catalog no. 422302) and 500 mouse serum (Jackson Immunoresearch, Catalog no. 015-000-120). The cells were incubated in the stain buffer at 4° C. for minimum of 30 minutes. At the end of the blocking period, the cells were incubated with 100 μL of Alexa Fluor 647 fluorescent compound labeled anti-LAP/TGFβ1 antibodies or an Alexa Fluor 647 fluorescent compound labeled corresponding isotype control antibody for 30 minutes at 4° C. See Table 47.

TABLE 47
Anti-LAP/TGFβ Antibody Candidates and Isotypes

| | | | | Degree of |
|---|---|---|---|---|
| Antibody | Lot No. | Antibody Description | Fluorophore | Labeling |
| Hu IgG1 | 98BHI | Humanized × [RSV] mAb (Synagis) IgG1 | AF647 | 4.1 |
| LALA DS | | L234A L235A D265S/Kappa (CX) | | |
| Parental | 54BJS | Humanized × [LAP-TGFb1_H] mAb (20E6) | AF647 | 3.7 |
| 20E6 mAb | | IgG1 L234A L235A D265S/Kappa (PS) | | |
| 12BLM | 48BMD | Humanized × [LAP-TGFb1_H] mAb | AF647 | 4.4 |
| | | (20E6_VH_W33D_I58V/VL_T30Y R53V_ | | |
| | | H55E S56T_T93E) IgG1 L234A L235A | | |
| | | D265S/Kappa (CX) | | |
| 07BLM | 43BMD | Humanized × [LAP-TGFb1_H] mAb | AF647 | 3.5 |
| | | (20E6_VH_W33D_K59R/VL_T30Y N31S_ | | |
| | | R53N H55E_S56T) IgG1 L234A L235A | | |
| | | D265S/Kappa (CX) | | |
| 11BLM | 47BMD | Humanized × [LAP-TGFb1_H] mAb | AF647 | 3.6 |
| | | (20E6_VH_W33D_K59R/VL_T30Y R53V_ | | |
| | | H55E_S56T) IgG1 L234A L235A D265S/Kappa (CX) | | |
| 15BLM | 51BMD | Humanized × [LAP-TGFb1_H] mAb | AF647 | 4.5 |
| | | (20E6_VH_W33D/VL_T30Y_H55E_S56T) | | |
| | | IgG1 L234A L235A D265S/Kappa (CX) | | |
| 19BLM | 55BMD | Humanized × [LAP-TGFb1_H] mAb | AF647 | 3.3 |
| | | (20E6_VH_W33D_W99Y Y101H/VL_T30 | | |
| | | Y_H55E_S56T) IgG1 L234A L235A D265S/Kappa (CX) | | |
| 18BLM | 54BMD | Humanized × [LAP-TGFb1_H] mAb | AF647 | 3.5 |
| | | (20E6_VH_W33D_W99Y_Y101H/VL T30 | | |
| | | Y_H55E_S56T) IgG1 L234A L235A D265S/Kappa (CX) | | |

[0822] Samples were washed with Dulbecco's phosphate-buffered saline (DPBS, Gibco, Catalog no. 14190-144) and incubated with 100 μL of 0.5% solution of fixable viability dye (eBioscience, Catalog no. 65-0866-18) in DPBS for 20 minutes at 4° C. Samples were washed with 2 mL of stain buffer and then incubated with 50 μL of a blocking buffer mix containing stain Buffer with 10% human TruStain FcX blocking solution (BioLegend) and 4% mouse serum for 10 minutes at 4° C. Human TruStain FcX™ is specially formulated for blocking the FcR-involved unwanted staining without interfering with antibody-mediated specific staining of human cells. Samples were then incubated with 150 μL of a Flow cytometry panel containing fluorescently labeled antibodies (Table 48) to surface markers for 30 minutes at 4° C.

TABLE 48
Surface markers for Identification of
Immune Cell Subsets by Flow Cytometry

| Targeted | | | |
|---|---|---|---|
| antigen | Fluorophore | Vendor | Catalog No. |
| CD8 | BUV395 | BD Biosciences | 563795 |
| CD3 | BUV496 | BD Biosciences | 750969 |
| CD4 | BUV737 | BD Biosciences | 612748 |
| CD66b | FITC | BioLegend | 305104 |
| CD11b | PerCP/Cy5.5 | BioLegend | 101228 |
| CD127 | PE-eF610 | eBiosciences | 61-1278-42 |
| CD25 | PE/Cy7 | BD Biosciences | 335789 |
| CD45 | AF700 | BioLegend | 304024 |
| Fixable | eF506 | eBiosciences | 65-0866-18 |
| Viability Dye | | | |
| CD56 | BV650 | BD Biosciences | 564057 |
| CD19 | BV711 | BD Biosciences | 563036 |
| CD14 | BV785 | BioLegend | 301840 |

Samples were then washed with stain buffer and were fixed with 1.6% paraformaldehyde (Electron Microscopy Sciences, Catalog no. 15710) for 15 minutes at 4° C. Cells were again washed, pelleted and resuspended in 200 μL of stain buffer and detected using a Becton Dickinson Fortessa flow cytometer.

[0823] Data analysis was performed using a Flow Jo V10.6.2 software, which is a software capable of analyzing flow cytometry data. Any dead cells were excluded from analysis based on staining with an appropriate viability dye. Cell surface staining with CD45 was used to identify total immune cells. Staining with CD11b was used to separate myeloid cells from non-myeloid cells. Within the myeloid population, monocyte macrophages were identified as being CD14 positive and CD66b negative. Lymphocytes were identified from the non-myeloid population based on forward and side scatter and were divided into B cells, T cells and NK cells using CD19, CD56 and CD3 antibodies, respectively. The CD3+ T cells were then further subdivided into CD4+ and CD8+ cells. Regulatory T cells were identified as being CD4 and CD25 positive and CD127 low. Total LAP expression on monocyte macrophages were evaluated by gating on the subset positive for AF647 labeled anti-LAP/TGFβ1 antibodies and expressed as percent positive of CD14+CD66b− myeloid cells. Binding data to the tumor infiltrating immune cells for the anti-LAP/TGFβ1 parental antibody and the selected affinity matured humanized antibodies are shown in FIG. 14.

### Example 18. Binding of the Affinity Matured LAP-TGFB Antibodies to Various Populations of Human and Rhesus Whole Blood and to Primary Keratinocytes and Hepatocytes

### Materials and Methods

### Test Articles, Control Antibodies, Whole Blood, Keratinocytes, and Hepatocytes

[0824] Six anti-LAP-TGFB affinity matured 20E6 clones, parental 20E6, and anti-RSV antibodies were labeled with Alexa Fluor 647 fluorescent dye (AAT Bioquest) with a degree of labeling between 3-5. The other control antibodies Trastuzumab (anti-HER2/neu mAb), Natalizumab (anti-alpha-4 integrin mAb) were labeled with Dylight-650 following the vendor's protocol (Dylight 650 labeling kit; cat #84535). Human whole blood was obtained from the in-house volunteer donor program at Merck Research Laboratories (South San Francisco, Calif., USA). Fresh whole blood (WB) (10 ml each) was collected from 2 healthy donors in K2-EDTA vacutainer tubes on the day of the experiment. Rhesus whole blood was obtained from ValleyBio Systems. The vendor collected WB from 2 healthy rhesus donors in K2-EDTA tubes and shipped it to Merck Lab within 2 hours of blood draw. Multiple donor vials of normal adult human epidermal keratinocytes (NHEK) were obtained from PromoCell (Cat #C-12001, C-12003). Donors of adult normal human hepatocytes (NHH) were obtained from LifeNet Health (cat #MTOXH1005).

### Whole Blood Sample Preparation for Flow Cytometry

[0825] All the test (parental humanized 20E6 antibody and the selected affinity matured humanized antibodies) and control antibodies were diluted to 100 ug/ml (10× concentration) in DPBS (Dulbecco's phosphate buffered saline, #14190-144). See Table 49.

TABLE 49
Information on AF-647 labeled test antibodies
and DL650 labeled control antibodies

| Antibody | |
|---|---|
| identifier | |
| in this | |
| example | Further information |
| 43BMD | Humanized × [LAP-TGFb1_H] mAb (20E6-_VH_W33D_K59R/ |
| | VL_T30Y_N31S_R53N_H55E_S56T) IgG1L234A L235A |
| | D265S/Kappa (CX) |
| 47BMD | Humanized × [LAP-TGFb1_H] mAb (20E6-_VH W33D_K59R/ |
| | VL_T30Y_R53V_H55E_S56T) IgG1L234A |
| | L235A D265S/Kappa (CX) |
| 48BMD | Humanized × [LAP-TGFb1_H] mAb (20E6-_VH_W33D_158V/ |
| | VL_T30Y_R53V_H55E_S56T_T93E) IgG1 L234A L235A |
| | D265S/Kappa (CX) |
| 51BMD | Humanized × [LAP-TGFb1_H] mAb (20E6 |
| | VH W33D/VL_T30Y_H55E_S56T) IgG1 L234A L235A D265S/ |
| | Kappa (CX) |
| 54BMD | Humanized × [LAP-TGFb1_H] mAb (20E6-_VH_W33D_W99Y_Y101H/ |
| | VL_T30Y_H55E_S56T) IgG1L234A L235A D265S/Kappa (CX) |
| 55BMD | Humanized × [LAP-TGFb1_H] mAb (20E6-_VH_W33D_W99Y_Y101H/ |
| | VL_T30Y_R53Y_H55E_S56T) IgG1 L234A L235A D265S/Kappa (CX) |
| 54BJS | Humanized × [LAP-TGFb1_H] mAb (20E6) IgG1 L234A L235A |
| | D265S/Kappa (PS) |
| 38BLI | Human × [LAP-TGFb1_H] mAb (b1-Ab6) IgG4 S228P (CX) |
| 98BHI | Humanized × [RSV] mAb IgG1 L234A L235A D265S/Kappa (CX) |

Dylight-650 labeled controls:

### 96BAL: Humanized×[ITGA4_H] mAb IgG4/Kappa (MY)

### 33AWX: Humanized×[ERBB2_HH] mAb IgG1/Kappa (CS)

[0826] These labeled antibodies were incubated in a 96-well assay blocked with WB at a concentration of 10 μg/mL (final concentration) for 30 minutes at 4° C. To check binding to RBCs and platelets, 3 additional concentrations were tested whereas binding to WBCs was assessed only at 10 μg/mL. Wells with WB only was included for untreated controls.

### Human Red Blood Cells (RBCs) and Platelet Staining:

[0827] An aliquot from the incubated WB was used for RBCs staining and platelets staining was performed using a flow cytometry panel (Table 50; 30 min at 4° C.).

TABLE 50
Flow cytometry panel information -

| Antigen | Fluorophore | Vendor | Catalog # |
|---|---|---|---|
| CD42a | BV421 | BD Biosciences | 565444 |
| CD235a | PE-Cy7 | BD Biosciences | 563666 |
| CD45 | FITC | BD Biosciences | 555482 |
| GARP | PE | Biolegend | 352054 |

[0828] Post incubation the treated, the stained blood samples were treated with a fixed agent (1% paraformaldehyde; Alfa Aesar, PFA16% Cat #43368) for 15 minutes at room temperature. A volume (1 ml) of FACS buffer (BD biosciences; #554656) was added to the samples and the samples were analyzed using a Becton Dickinson (BD) LSRII flow cytometer within 4 hours.

### Human White Blood Cells (WBCs) Staining:

[0829] The RBCs in the assay block containing the remainder of treated WB were lysed with 2 ml each of Ammonium-Chloride-Potassium (ACK) lysing buffer (GIBCO, Cat #A10492-01) by incubating the assay block for 5-7 minutes at room temperature. The assay block was centrifuged at 1500 rpm for 5 minutes and the supernatant was aspirated. The lysing of RBCs was repeated, and the cells were washed with 2 ml of DPBS. The cell pellet was re-suspended in 200 uL of DPBS containing eFLuor506 dye diluted 1:500 (eBiosciences, Fixable viability dye; Cat #65-0866-14) and incubated for 15-20 min at 4° C. The eFluor 506 organic dye is a violet-laser excitable fluorophore that has an emission peak of 506 nm. After incubation the assay block was washed with 1 ml of FACS buffer. The cells were blocked with 50 uL FACS buffer containing Fc block solution for 10 minutes at 4° C. Investigators used 36 uL FACS buffer 10 uL human Fc block (Miltenyi Biotec, Cat #120-000-442) and 4 uL normal mouse serum (Jackson ImmunoResearch Inc. Cat #015-000-120) per reaction. The cells were incubated with the following panel of commercial antibodies (see Table 51 below) for 30 minutes at 4° C. Post incubation, the cells were washed, fixed in 1% paraformaldehyde for 30 minutes at room temperature. The cells were then washed and re-suspended in FACS buffer prior to detecting using a BD LSR Fortessa™ X20 flow cytometer.

TABLE 51
Information regarding the panel of commercial
antibodies utilized in WBC staining

| Antigen | Fluorophore | Vendor | Catalog # |
|---|---|---|---|
| CD20 | FITC | BD Biosciences | 555622 |
| CD3 | Pacific Blue | BD Biosciences | 558124 |
| CD4 | PE/CF594 | BD Biosciences | 562402 |
| CD8 | BUV395 | BD Biosciences | 563795 |
| CD56 | PE | BD Biosciences | 555516 |
| CD14 | BV785 | BioLegend | 301840 |
| CD15 | PerCpCy5.5 | BD Biosciences | 560828 |

### Rhesus RBCs, Platelet and WBCs Staining

[0830] The above protocol was followed for staining of RBCs, platelets and WBCs from healthy rhesus monkey whole blood with the following exceptions. The human CD235a RBC marker does not cross-react with rhesus blood. The rhesus RBCs are were separated/analyzed using a on forward scatter area (FSC-A) density plot vs and side scatter area (SSC-A) density plot. The A anti-CD45 antibody (BD biosciences, cat #557803) is was used for gating/separating out whether the lymphocytes is was non-human primate specific. NKG2A (CD159) was used as the lineage marker for rhesus NK cells (Miltenyi Biotec cat #130-113-566). The CD15 antibody does not cross-react to rhesus granulocytes. The rhesus granulocytes were selected using aby FSC-A density plot and a vs and SSC-A density plot.

### Hepatocyte and Keratinocyte Staining

[0831] All the test and control labeled antibodies were diluted to 20 ug/ml (2× concentration) in DPBS (Catalog No. #14190-144). Multiple frozen vials of primary keratinocytes from 2 donors were thawed and transferred to a tube containing 10 mL Dulbecco's modified Eagle's medium (DMEM, Gibco cat #11995-065) supplemented with 2% FBS. The cells were centrifuged (500 g ×1500 RPM, 4° C.) for 5 minutes and any supernatant was discarded. The cells washed and re-suspended with DPBS. The cell viability, and cell number were determined and recorded. Approximately 500 thousand cells were transferred to a 96 well V-bottom plate (USA Scientific, Inc; cat #1896-5110) for an unstained sample. Cell viability was determined by adding eFLuor™506 (1:500 dilution; Fixable Viability Dye eFluor506, eBioscience #65-0866-18) dye to rest of the remaining cells. The cells and dye were incubated at 4° C. for 30 minutes. (The cells were washed and re-suspended in FACS buffer and were divided into wells of a 96-well plate. The cells were incubated for 30 minutes at 4° C. with labeled test antibodies or control antibodies concentrated at 10 μg/mL. After incubation, the antibody administered cells were washed with FACS buffer solution and were blocked for 10 minutes at 4° C. with 50 uL FACS buffer containing Fc block. Investigators used 36 uL of FACS Buffer, 10 uL human Fc block solution (Miltenyi Biotec, Cat #120-000-442) and 4 uL normal mouse serum (Jackson ImmunoResearch Inc. Cat #015-000-120) per each reaction. The cells were incubated with a flow cytometry staining panel [EGFR (for keratinocytes) fluorophore PerCpCy5.5 Biolegend; ASGPR1 (for hepatocytes) fluorophore PE BD Biosciences)] for 30 minutes at 4° C.

[0832] The cells were washed twice with FACS buffer and were centrifuged (500 times gravity), at 4° C. for 5 minutes. The cells were treated with 1% paraformaldehyde (Alfa Aesar, cat #43368) fixing agent. The cells were pelleted and re-suspended in FACS buffer before being analyzed using an BD LSRII or Fortessa flow cytometer.

[0833] The protocol utilized for checking binding to hepatocytes was the same as described above with the following differences; upon being thawed, the cells were transferred to 40 mL of hepatocyte thawing media (Invitrogen; cat #CM7000) instead of the DMEM described in the protocol above. In addition, the specific lineage marker utilized for staining human hepatocytes was an anti-ASGPR1 antibody.

### FACS Data Analysis

[0834] Data analysis was performed using a FlowJo V10 software system. Dead cells were excluded from analysis and viable cells identified using a viability dye stain. Peripheral blood mononuclear cells were identified utilizing a forward and side scatter (FSC vs SSC) gating analysis. Lymphocytes were separated into B cells and T cells by CD20lineage markers and CD3 lineage markers, respectively. The non-B cell T population was further separated into the following subgroups: CD56+NK (for human), NKG2A (for rhesus) and CD14+ monocytes. CD3+ T cells were then further subdivided into CD4+ and CD8+ cells. The granulocytes were gated/separated into a CD15+ population in human WB samples and FSC-A and SSC-A gating analysis for rhesus samples.

[0835] Dead hepatocytes or keratinocytes were excluded by staining cell samples with a viability dye, and gated using FSC-A and SSC-A gating analysis after singlet selection. Singlets were gated on their specific lineage markers.

[0836] All the cell subset populations were further gated on AF647+ cells or Dylight 650+ cells. The mean fluorescent intensity (MFI) and percent positive for AF647+ or Dylight+ cells were determined.

### Results:

### Human RBCs and Platelets:

[0837] Data show that each of the affinity matured LAP-TGFβ antibodies, parental 20E6 antibody, anti-RSV antibody, anti-ER2/neu antibody Trastuzumab did not bind human RBCs (FIG. 15A). This lack of binding was observed across each of the concentrations tested: 0.02, 0.2, 2, and 10 ug/mL. All the 6 affinity matured LAP-TGFβ analyzed in this Example bound to human platelets in a dose dependent manner at 0.2, 2, and 10 ug/mL(FIG. 15B). The percent positive AF647 platelet binding for all the 6 antibodies was greater than the binding seen with parental 20E6 antibody for each concentration tested in this Example.

### Human WBCs:

[0838] The data show that the affinity matured LAP-TGFβ antibodies, parental 20E6, trastuzumab (each at a concentration of 10 μg/mL) did not bind to human CD20+B, CD4+T, CD8+T, CD56+ NK cells and granulocytes. See FIG. 15C, FIG. 15D, and FIG. 15F. Data show that the LAP-TGFB antibodies target CD14+ monocytes (FIG. 15E). This binding of CD14+ monocytes by the selected affinity matured anti-LAP-TGFB humanized antibodies was observed to be greater than what was observed with the parental 20E6 humanized antibody. Natalizumab at a concentration of at 10 μg/mL was utilized as a positive control in many of the binding experiments, and data show that this antibody bound to all of the tested WBCs populations.

### Rhesus RBCs and Platelets:

[0839] Data show that (at the 4 concentrations tested) each of the antibodies (i.e., the selected six affinity matured anti-LAP-TGFB antibodies, parental 20E6 humanized antibody, anti-RSV antibody, and HER2/neu antibody Trastuzumab) did not bind rhesus RBCs (FIG. 16A). All the affinity matured anti-LAP-TGFB antibodies were observed to bind to rhesus platelets in a dose dependent manner at 0.2, 2, and 10 ug/mL (FIG. 16B). The percent positive AF647 platelet binding for each of the anti-LAP-TGFB antibodies was observed to be greater than the positive AF647 platelet binding observed for the parental 20E6 humanized antibody.

### Rhesus WBCs:

[0840] The affinity matured anti-LAP-TGFB antibodies, parental 20E6 antibody, and Trastuzumab (each at a concentration of 10 μg/mL) were observed not to have bound to rhesus CD20+B, CD4+T, CD8+T, NKG2A+ NK cells (FIG. 16C, FIG. 16D, and FIG. 16F). Data show that the affinity matured anti-LAP-TGFβ antibodies do show a range of on-target binding to CD14+ monocytes (FIG. 16E) and binding to granulocytes(FIG. 16F). The observed binding for the anti-LAP-TGFB antibodies was greater than what was observed for cells treated with the parental 20E6 antibody. Natalizumab was utilized as a positive control and data show that this antibody bound to all the tested WBCs populations.

### Human Hepatocytes and Keratinocytes:

[0841] It was observed that at the tested 10 ug/mL concentration each of the six affinity matured anti-LAP-TGFβ antibodies, parental 20E6 antibody, anti-RSV antibody, trastuzumab, and natalizumab did not bind human hepatocytes (FIG. 17A and FIG. 17B). At the tested 10 ug/mL concentration all the affinity matured anti-LAP-TGFB antibodies, parental 20E6, and anti-RSV antibodies do not bind human keratinocytes (FIG. 18A and FIG. 18B). Natalizumab and trastuzumab are positive control antibody.

### Example 19. Assessment of the Human Platelet Activation with the Affinity Matured LAP-TGFB Antibodies

[0842] Six anti-LAP TGFβ affinity matured 20E6 clones and parental 20E6 antibody were tested for their ability to activate platelets.

### Materials and Methods

[0843] The following lists additional controls used in the assays in this Example: Anti-human CD9 Tetraspanin, MRP-1, DRAP-24 (Biolegend); TRAP-6 trifluoroacetate salt Thrombin Receptor Activator Peptide 6 (BACHEM); and Adenosine diphosphate (ADP; Chrono-Log Corporation)

### Preparation of Agonist Controls Thrombin Receptor Activator Peptide-6 and Adenosine Diphosphate

[0844] A 5 mg vial of TRAP-6 peptide was dissolved in 1 mL water to give a stock concentration of 6.676 mM. Aliquots of 20 μL were transferred to tubes and frozen at −20° C. A 2.5 mg vial of ADP was reconstituted with 5 mL of DPBS (Hyclone #SH30028.02) to give a stock concentration of 1 mM. Aliquots of 20 μL were transferred to tubes and frozen at −20° C. Working stocks of TRAP-6 and ADP were prepared by diluting the solutions from 1 mM to 200 μM in HEPES-buffered Tyrode's solution (Boston bioproducts; cat #PY-921) supplemented with 2 mM calcium chloride and 2 mM magnesium chloride. The final concentrations used in the assay were 10 μM and 20 μM for both TRAP-6 and ADP.

Extraction of Platelet Rich Plasma from Whole Blood

[0845] Human whole blood was obtained from the in-house volunteer donor program at Merck Research Laboratories (South San Francisco, Calif., USA). Since many drugs can interfere with platelet studies, the potential donors were restricted to those who have not taken aspirin for 2 weeks or any other nonsteroidal anti-inflammatory drugs for at least 48 hours before donation. The first draw of 2 mL of collected blood was discarded. The next 30 mL of blood drawn was collected into tubes with acid citrate dextrose (ACD) solution A (ACD soln A, BD Biosciences cat #364606), gently inverted 10 times, and kept at room temperature.

[0846] The ACD tubes with whole blood underwent centrifugation in the Sorvall centrifuge at 200×g for 15 minutes without brake. After the spin, the top platelet rich plasma layer (PRP) was transferred to a fresh tube.

### Platelet Activation Assay

[0847] Calcium chloride (Boston bioproducts; cat #MT-140) and magnesium chloride (VWR Lifescience; cat #E5225-100 mL) were each added to the PRP at 2 mM concentration, mixed, and incubated for 5 minutes at room temperature. All the test and the control articles were diluted to 100 μg/mL (10×) in HEPES-buffered Tyrode's solution supplemented with 2 mM calcium chloride and 2 mM magnesium chloride. The anti-LAP TGFb antibodies, trastuzumab and anti-RSV antibodies were diluted 1:5 to 20 ug/mL. Anti-human CD9, anti-human CD151, and the agonists ADP and TRAP-6 were tested at 2 concentrations.

[0848] The agonist controls, control mAb, and anti-LAP TGFb antibodies were added to appropriate wells of a 96-well assay block. PRP was added and mixed by pipetting and the mixture was incubated at room temperature for 20 minutes. An aliquot from this incubated mixture was used for platelet staining with the following flow cytometry panel (antigen CD42a fluorophore PerCp (BD Biosciences); antigen PAC-1 fluorophore FITC (BD Biosciences); antigen CD62P fluorophore PE (BD Biosciences)] for 30 minutes at 4° C. then fixed with 100 μL of 1% paraformaldehyde (Alfa Aesar; Cat #43368) for 15 minutes at room temperature. Samples were analyzed using a BD LSR II flow cytometer or BD LSRFortessa™ X20 flow cytometer.

[0849] Activation was compared to PRP that was treated the same but not incubated with antibody or agonists (no mAb control). Platelets were identified by gating on CD42a+ population. Activated platelets were identified by an increase in mean fluorescence intensity (MFI) of CD62P and PAC-1 when compared to PRP not incubated with mAb or agonist. Data was analyzed using FlowJo software, Version 10 and plotted using GraphPad Prism Software.

### Results

[0850] At the concentrations and condition tested, the selected affinity matured anti-LAP-TGFB antibodies, parental 20E6 antibody, and controls (i.e., anti-RSV antibody, trastuzumab and natalizumab) showed no evidence of platelet activation in PRP from multiple human donors. There was no increase in the percent of positive CD62P (FIG. 19A) or PAC-1 PRP (FIG. 20A) upon incubation with test articles, trastuzumab, or anti-RSV antibody.

[0851] Incubation of PRP with control agonists (ADP or TRAP-6) and positive control mAb (anti-human CD9 or anti-human CD151) led to an increase the percent of CD62P positive cells (FIG. 19B). Incubation of PRP with the positive control mAbs led to an increase in the percent of PAC-1 positive cells (FIG. 20A).

### Example 20. Yeast Display Mutants Binding Human LAP-TGFB Isoforms 1, 2, and 3

[0852] This Example analyzed the isoform specificity of the yeast display mutants to bind to human LAP-TGFβ isoforms 1, 2, and 3 using surface plasmon resonance.

[0853] A Series S CM4 sensor chip (Cytiva, catalog BR100534) was immobilized with an anti-human Fc capture antibody following the steps described in the kit protocol (Cytiva, catalog BR100839) on a Biacore T200 instrument with 1×HBS-EP+(Teknova, catalog H8022). Kinetic binding interactions between human LAP-TGFβ isoform 1 and yeast display mutants were performed in 1× HBS-EP+ with 0.1 mg/mL BSA pH 7.4 (Jackson Immunoresearch, catalog 001-000-162) at 25° C. Approximately 20-40 RU of human LAP-TGFβ-Fc isoform 1 was captured to the anti-human Fc surface followed by injection of 1:4 serially diluted Fab from 1000 nM to 3.91 nM (parental humanized 20E6 antibody) and 1:3 serially diluted Fab from 60 nM to 0.74 nM (mutants 59BLH, 62BLH, 65BLH-68BLH), 6 nM to 0.07 nM (mutants 55BLH, 57BLH, 58BLH, 63BLH, 64BLH), and 2 nM to 0.02 nM (mutants 54BLH, 56BLH, 60BLH, 61BLH) including 0 nM Fab. Binding specificity between human LAP-TGFβ isoforms 2 and 3 and yeast display mutants were performed in 1×HBS-EP+ with 0.1 mg/mL BSA pH 7.4 at 25° C. Approximately 20-40 RU of human LAP-TGFβ2 and 3 were captured to the anti-human Fc surface followed by injection of 1000 nM Fab including a 0 nM Fab. The binding data were double referenced by subtraction of signal from a reference (capture surface only) flow cell and the 0 nM Fab injection. Binding rate constants were determined by fitting the data with a 1:1 binding model (Cytiva Biacore T200 Evaluation software 3.0).

[0854] As shown in Table 52, the parental humanized 20E6 antibody bound to human LAP-TGFβ1 with nanomolar affinity, but no appreciable binding was observed to human LAP-TGFβ isoform 2 or 3 to 1000 nM Fab. The yeast display mutants demonstrated 16 to >10000-fold improved binding affinity to human LAP-TGFβ1 over the binding data for the parental humanized 20E6 antibody. Like the data for the parental humanized 20E6 antibody, the yeast display mutants did not bind human LAP-TGFβ isoform 2 and 3.

TABLE 52
Binding parameters for 20E6 and yeast display mutants binding to human LAP-TGFβ isoforms 1, 2, and 3

| | | LAP-TGFβ1 | | | | | |
|---|---|---|---|---|---|---|---|
| | | | | | Fold | LAP-TGFβ2 | LAP-TGFβ3 |
| | Sorting | kₒₙ | k_{off} | K_{D} | improvement | K_{D} | K_{D} |
| ID | population | (M⁻¹s⁻¹) | (s⁻¹) | (M) | in K_{D} | (M) | (M) |
| 20E6 (80BGJ) | parent | 1.32 × 10⁶ | 7.69 × 10⁻² | 5.85 × 10⁻⁸ | 1 | NB | NB |
| 54BLH | 12 hours sort | 4.96 × 10⁶ | 2.07 × 10⁻⁵ | 4.00 × 10⁻¹² | 14638 | NB | NB |
| 55BLH | 12 hours sort | 9.08 × 10⁶ | 5.28 × 10⁻⁴ | 5.90 × 10⁻¹¹ | 992 | NB | NB |
| 56BLH | 12 hours sort | 4.53 × 10⁶ | 2.57 × 10⁻⁵ | 6.00 × 10⁻¹² | 9758 | NB | NB |
| 57BLH | 12 hours sort | 6.06 × 10⁶ | 4.90 × 10⁻⁴ | 8.10 × 10⁻¹¹ | 723 | NB | NB |
| 58BLH | 2 hour P1 | 5.93 × 10⁶ | 3.13 × 10⁻⁴ | 5.30 × 10⁻¹¹ | 1105 | NB | NB |
| 59BLH | 2 hour P1 | 7.10 × 10⁶ | 4.70 × 10⁻⁴ | 6.60 × 10⁻¹¹ | 887 | NB | NB |
| 60BLH | 2 hr P1 | 7.91 × 10⁶ | 1.86 × 10⁻⁴ | 2.40 × 10⁻¹¹ | 2440 | NB | NB |
| 61BLH | 2 hour P2 | 3.57 × 10⁶ | 4.52 × 10⁻⁵ | 1.30 × 10⁻¹¹ | 4504 | NB | NB |
| 62BLH | 2 hour P2 | 4.69 × 10⁶ | 1.24 × 10⁻³ | 2.46 × 10⁻¹⁰ | 222 | NB | NB |
| 63BLH | 2 hour P2 | 6.79 × 10⁶ | 1.98 × 10⁻³ | 2.97 × 10⁻¹⁰ | 197 | NB | NB |
| 64BLH | 2 hour P2 | 6.51 × 10⁶ | 5.00 × 10⁻⁴ | 7.70 × 10⁻¹¹ | 760 | NB | NB |
| 65BLH | 2 hour P2 | 7.33 × 10⁶ | 1.07 × 10⁻³ | 1.46 × 10⁻¹⁰ | 401 | NB | NB |
| 66BLH | 2 hour P3 | 2.05 × 10⁶ | 7.64 × 10⁻³ | 3.73 × 10⁻⁹ | 16 | NB | NB |
| 67BLH | 2 hour P3 | 4.95 × 10⁶ | 4.76 × 10⁻³ | 9.61 × 10⁻¹⁰ | 61 | NB | NB |
| 68BLH | 2 hour P3 | 7.57 × 10⁶ | 3.31 × 10⁻³ | 4.38 × 10⁻¹⁰ | 134 | NB | NB |

NB—no binding observed

### Example 21. Yeast Display Mutants Binding Human LAP-TGFB Isoforms 1 at pH6.0

[0855] This Example analyzed the isoform specificity of the yeast display mutants to bind to human LAP-TGFβ1 isoform at pH6.0 using surface plasmon resonance.

[0856] A Series S CM4 sensor chip (Cytiva, catalog BR100534) was immobilized with an anti-human Fc capture antibody following the kit protocol (Cytiva, catalog BR100839) on a Biacore T200 instrument with 1× HBS-EP+ (Teknova, catalog H8022). Kinetic binding interactions between human LAP-TGFβ isoform 1 and yeast display mutants were performed in 1×HBS-EP+ with 0.1 mg/mL BSA pH 6.0 (Jackson Immunoresearch, catalog 001-000-162) at 25° C. Approximately 20-40 RU of human LAP-TGFβ-Fc isoform 1 was captured to the anti-human Fc surface followed by injection of 1:4 serially diluted Fab from 1000 nM to 3.91 nM (parental humanized 20E6 antibody) and 1:3 serially diluted Fab from 60 nM to 0.74 nM (mutants 59BLH, 62BLH, 65BLH-68BLH), 6 nM to 0.07 nM (mutants 55BLH, 57BLH, 58BLH, 63BLH, 64BLH), and 2 nM to 0.02 nM (mutants 54BLH, 56BLH, 60BLH, 61BLH) including 0 nM Fab. The binding data were double referenced by subtraction of signal from a reference (capture surface only) flow cell and the 0 nM Fab injection. Binding rate constants were determined by fitting the data with a 1:1 binding model (Cytiva Biacore T200 Evaluation software 3.0).

[0857] As shown in Table 53, Fab binding affinity at pH6.0 was slightly weaker than what was observed at pH7.4 and maybe due to slightly faster k_{off} rates. In contrast, Fabs 59BLH, 64BLH, and 65BLH were observed to have a Fab binding affinity that was slightly higher (i.e., higher binding) at pH6.0 than at pH7.4.

TABLE 53
Binding parameters for 20E6 and yeast display mutants binding to human LAP-TGFβ isoforms 1 at pH 6.0 and pH 7.4

| | | | | | | | | Fold change |
|---|---|---|---|---|---|---|---|---|
| | | pH 6.0 | | | pH 7.4 | | | in K_{D} from |
| | Sorting | kₒₙ | k_{off} | K_{D} | kₒₙ | k_{off} | K_{D} | pH 7.4 to |
| ID | population | (M⁻¹s⁻¹) | (s⁻¹) | (M) | (M⁻¹s⁻¹) | (s⁻¹) | (M) | pH 6 |
| 20E6 (80BGJ) | parent | 9.34 × 10⁵ | 9.60 × 10⁻² | 1.03 × 10⁻⁷ | 1.32 × 10⁶ | 7.69 × 10⁻² | 5.85 × 10⁻⁸ | 1.8 |
| 54BLH | 12 hours sort | 7.56 × 10⁶ | 4.73 × 10⁻⁵ | 6.00 × 10⁻¹² | 4.96 × 10⁶ | 2.07 × 10⁻⁵ | 4.00 × 10⁻¹² | 1.5 |
| 55BLH | 12 hours sort | 7.17 × 10⁶ | 7.57 × 10⁻⁴ | 1.05 × 10⁻¹⁰ | 9.08 × 10⁶ | 5.28 × 10⁻⁴ | 5.90 × 10⁻¹¹ | 1.8 |
| 56BLH | 12 hours sort | 5.55 × 10⁶ | 5.56 × 10⁻⁵ | 1.00 × 10⁻¹¹ | 4.53 × 10⁶ | 2.57 × 10⁻⁵ | 6.00 × 10⁻¹² | 1.7 |
| 57BLH | 12 hours sort | 1.54 × 10⁷ | 1.59 × 10⁻³ | 1.06 × 10⁻¹⁰ | 6.06 × 10⁶ | 4.90 × 10⁻⁴ | 8.10 × 10⁻¹¹ | 1.3 |
| 58BLH | 2 hr P1 | 6.88 × 10⁶ | 5.91 × 10⁻⁴ | 8.60 × 10⁻¹¹ | 5.93 × 10⁶ | 3.13 × 10⁻⁴ | 5.30 × 10⁻¹¹ | 1.6 |
| 59BLH | 2 hr P1 | 1.11 × 10⁷ | 5.43 × 10⁻⁴ | 4.90 × 10⁻¹¹ | 7.10 × 10⁶ | 4.70 × 10⁻⁴ | 6.60 × 10⁻¹¹ | 0.7 |
| 60BLH | 2 hr P1 | 7.23 × 10⁶ | 4.81 × 10⁻⁴ | 6.70 × 10⁻¹¹ | 7.91 × 10⁶ | 1.86 × 10⁻⁴ | 2.40 × 10⁻¹¹ | 2.8 |
| 61BLH | 2 hour P2 | 3.91 × 10⁶ | 1.21 × 10⁻⁴ | 3.10 × 10⁻¹¹ | 3.57 × 10⁶ | 4.52 × 10⁻⁵ | 1.30 × 10⁻¹¹ | 2.4 |
| 62BLH | 2 hour P2 | 5.80 × 10⁶ | 1.68 × 10⁻³ | 2.90 × 10⁻¹⁰ | 4.69 × 10⁶ | 1.24 × 10⁻³ | 2.46 × 10⁻¹⁰ | 1.2 |
| 63BLH | 2 hour P2 | 7.51 × 10⁶ | 2.77 × 10⁻³ | 3.69 × 10⁻¹⁰ | 6.79 × 10⁶ | 1.98 × 10⁻³ | 2.97 × 10⁻¹⁰ | 1.2 |
| 64BLH | 2 hour P2 | 3.49 × 10⁷ | 8.43 × 10⁻⁴ | 2.40 × 10⁻¹¹ | 6.51 × 10⁶ | 5.00 × 10⁻⁴ | 7.70 × 10⁻¹¹ | 0.3 |
| 65BLH | 2 hour P2 | 4.35 × 10⁶ | 2.62 × 10⁻³ | 6.04 × 10⁻¹¹ | 7.33 × 10⁶ | 1.07 × 10⁻³ | 1.46 × 10⁻¹⁰ | 0.4 |
| 66BLH | 2 hour P3 | 2.09 × 10⁶ | 2.21 × 10⁻² | 1.05 × 10⁻⁸ | 2.05 × 10⁶ | 7.64 × 10⁻³ | 3.73 × 10⁻¹⁰ | 2.8 |
| 67BLH | 2 hour P3 | 7.63 × 10⁶ | 1.22 × 10⁻² | 1.59 × 10⁻⁹ | 4.95 × 10⁶ | 4.76 × 10⁻³ | 9.61 × 10⁻¹⁰ | 1.7 |
| 68BLH | 2 hour P3 | 8.94 × 10⁶ | 4.54 × 10⁻³ | 5.08 × 10⁻¹⁰ | 7.57 × 10⁶ | 3.31 × 10⁻³ | 4.38 × 10⁻¹⁰ | 1.2 |

### Example 22: Kinetic Exclusion Assay Association Rate and Affinity Assessment Analysis of Yeast Display Mutants Binding Human LAP-TGFβ Isoform 1

[0858] An orthogonal kinetic exclusion assay (KinExA) method was used in this study to measure the affinities of affinity-matured anti-LAP-TGFβ1 antibodies (referred to as the constant binding partner, CBP) and human LAP-TGFβ1 (referred to as the titrant). To determine the free CBP concentration in solution, biotinylated human LAP-TGFβ1 coated PMMA (Sapidyne, catalog 440176) beads were prepared by first coating with biotin-BSA (ThermoScientific, catalog 29130) followed by streptavidin (Invitrogen, catalog S888), and a final coat with biotinylated human LAP-TGFβ1-Fc.

[0859] For association rate analysis, an experimentally optimized constant concentration of CBP and titrant, were mixed 1:1 and free CBP was measured at timed intervals ranging from 15 to 10000 seconds. The KinExA detection method was performed as follows: PMMA beads were loaded into the flow cell, a single injection of titrant human LAP-TGFβ1 and antibody CBP was flowed over the flow cell, free CBP bound by the PMMA beads was detected with goat anti-human F(ab′)₂ F(ab′)₂ fragment specific-647 conjugate (Jackson Immunoresearch, catalog 109-605-097). The data were analyzed with KinExA Pro software (version 4.4.26) where the free CBP binding signals were converted into percent free response, plotted against time (seconds) and processed with the n-curve software “Kinetics, Direct” analysis method.

[0860] For equilibrium affinity analysis, two experimentally optimized CBP concentrations were combined with 1:2 serially diluted titrant, human LAP-TGFβ1, and incubated at room temperature to achieve equilibrium. The KinExA detection method was performed as follows: PMMA beads were loaded into the flow cell, a single concentration of titrant human LAP-TGFβ1 at equilibrium with a given antibody CBP was flowed over the flow cell, free CBP bound by the PMMA beads was detected with goat anti-human F(ab′)₂ F(ab′)₂ fragment specific-647 conjugate (Jackson Immunoresearch, catalog 109-605-097). The data was analyzed with KinExA Pro software (version 4.4.26) where the free CBP binding signals were converted into percent free response and plotted against the titrant concentration series. The equilibrium K_{D} was determined by processing with n-curve software “Equilibrium” analysis method.

[0861] As shown in Table 54, the association rate and equilibrium affinity analysis by KinExA shows that anti-human LAP-TGFβ1 antibodies bind to human LAP-TGFβ1 with a range of K_{D} from 0.37 fM to 68 pM.

TABLE 54
Association rate and equilibrium parameters of affinity
mature antibodies binding to human LAP-TGFβ isoforms 1

| | | | | | | 95% | |
|---|---|---|---|---|---|---|---|
| | Sorting | kₒₙ | k_{off} | K_{D} | Error | Confidence | |
| ID | population | (M⁻¹s⁻¹) | (s⁻¹) | (M) | (%) | Interval | |
| 70BLH | 12 hours sort | 1.28 × 10⁷ | 2.82 × 10⁻⁵ | 2.24 × 10⁻¹² | 1.98 | 1.61-2.99 | pM |
| 74BLH | 2 hr P1 | 1.63 × 10⁷ | 8.14 × 10⁻⁶ | 1.33 × 10⁻¹² | 1.42 | 0.98-1.73 | pM |
| 75BLH | 2 hr P1 | 2.04 × 10⁷ | 7.71 × 10⁻⁶ | 3.67 × 10⁻¹³ | 3.31 | 0.02-0.92 | pM |
| 78BLH | 2 hour P2 | 1.09 × 10⁷ | 2.56 × 10⁻⁵ | 2.35 × 10⁻¹² | 2.67 | 0.90-4.36 | pM |
| 79BLH | 2 hour P2 | 5.03 × 10⁶ | 1.38 × 10⁻⁵ | 2.75 × 10⁻¹² | 2.95 | 1.74-4.04 | pM |
| 81BLH | 2 hour P3 | 9.83 × 10⁴ | 6.09 × 10⁻⁶ | 6.21 × 10⁻¹¹ | 2.48 | 45.40-83.20 | pM |
| 82BLH | 2 hour P3 | 2.92 × 10⁴ | 1.98 × 10⁻⁶ | 6.80 × 10⁻¹¹ | 2.65 | 46.80-95.10 | pM |

### Example 23. Direct Affinity Comparison of Yeast Display Mutant mAbs and Fabs Against Human LAP-TGFβ Isoform 1 at PH7.4 and PH6.0

[0862] This Example describes a Biacore analysis to evaluate binding kinetics for select yeast display mutant mAbs and corresponding Fabs against human LAP-TGFβ isoform 1.

[0863] A Series S C1 sensor chip (Cytiva, catalog BR100535) was immobilized with low densities of high affinity Fab 54BLH on a Biacore T200 instrument with 1×HBS-EP+(Teknova, catalog H8022). This surface served as a monovalent capture surface for a low-density layer of heterodimer human LAP-TGFβ1 complex leaving the second binding site exposed for monovalent kinetic binding analysis with both mAbs and Fabs. Immobilized flow cell 1 served as the reference and flow cells 2, 3 and 4 were used to evaluate the binding interaction between human LAP-TGFβ1 and yeast display mutant mAbs and Fabs.

[0864] Kinetic binding interactions were assessed at 25° C. and performed in 1×HBS-EP+ with 0.1 mg/mL BSA (Jackson Immunoresearch, catalog 001-000-162) at either pH7.4 or pH6.0. Approximately 15-25 RU of human LAP-TGFβ1-Fc was captured to the Fab capture surface followed by injection of 1:3 serially diluted Fabs and mAbs from 6 nM to 0.07 nM (Fabs: 54BLH, 55BLH, 60BLH, 63BLH, 64BLH-mAbs: 69BLH, 70BLH) and 1:3 serially diluted Fab and mAbs from 60 nM to 0.74 nM (Fabs: 59BLH, 66BLH, 67BLH—mAbs: 74BLH, 75BLH, 78BLH, 79BLH, 81BLH, 82BLH) including 0 nM. The binding data was double referenced by subtraction of signal from a reference flow cell and the 0 nM injections for evaluation of Fabs and mAbs respectively. Binding rate constants were calculated/determined by fitting the data with a 1:1 binding model (Cytiva Biacore T200 Evaluation software 3.0).

[0865] As shown in Table 55 and Table 56, in general the mutant yeast mAbs exhibited similar to slightly higher binding affinity to human LAP-TGFβ1 compared to the corresponding Fabs in both pH7.4 or pH6.0 with one exception, antibody 82BLH, which exhibited a 5 to 13-fold strengthened affinity as an mAb. Binding affinities at pH6.0 were reduced, -3 to 19-fold when compared to pH 7.4.

TABLE 55
Binding parameters comparison between yeast display mutant Fabs and mAbs binding in pH 7.4

| | | | | | | | | | Fab/mAb |
|---|---|---|---|---|---|---|---|---|---|
| Fab | Sorting | | k_{off} | K_{D} | mAb | | k_{off} | K_{D} | K_{D} |
| ID | population | kₒₙ | (s⁻¹) | (M) | ID | kₒₙ | (s⁻¹) | (M) | Ratio |
| 54BLH | 12 hours sort | 7.03 × 10⁶ | 3.34 × 10⁻⁵ | 4.77 × 10⁻¹² | 69BLH | — | — | n.d. | ND |
| 55BLH | 12 hours sort | 8.75 × 10⁶ | 1.09 × 10⁻³ | 1.25 × 10⁻¹⁰ | 70BLH | 1.45 × 10⁷ | 6.71 × 10⁻⁴ | 4.70 × 10⁻¹¹ | 0.3 |
| 59BLH | 2 hour P1 | 1.31 × 10⁷ | 5.75 × 10⁻⁴ | 4.40 × 10⁻¹¹ | 74BLH | 1.47 × 10⁷ | 3.74 × 10⁻⁴ | 2.60 × 10⁻¹¹ | 1.7 |
| 60BLH | 2 hour P1 | 9.65 × 10⁶ | 3.48 × 10⁻⁴ | 3.60 × 10⁻¹¹ | 75BLH | 1.91 × 10⁷ | 2.12 × 10⁻⁴ | 1.11 × 10⁻¹¹ | 3.2 |
| 63BLH | 2 hour P2 | 9.61 × 10⁶ | 3.41 × 10⁻³ | 3.55 × 10⁻¹⁰ | 78BLH | 2.22 × 10⁷ | 1.96 × 10⁻³ | 8.76 × 10⁻¹¹ | 4.0 |
| 64BLH | 2 hour P2 | 1.53 × 10⁷ | 9.39 × 10⁻⁴ | 6.20 × 10⁻¹¹ | 79BLH | 1.44 × 10⁷ | 5.52 × 10⁻⁴ | 3.80 × 10⁻¹¹ | 1.6 |
| 66BLH | 2 hour P3 | 5.76 × 10⁶ | 1.81 × 10⁻² | 3.13 × 10⁻⁹ | 81BLH | 5.40 × 10⁶ | 5.18 × 10⁻³ | 9.59 × 10⁻¹⁰ | 3.3 |
| 67BLH | 2 hour P3 | 6.69 × 10⁶ | 1.55 × 10⁻² | 2.36 × 10⁻⁹ | 82BLH | 7.82 × 10⁷ | 1.40 × 10⁻² | 1.78 × 10⁻¹⁰ | 13.3 |

n.d.—not determined, off-rate was beyond instrument limitations
ND—no data/not calculated

TABLE 56
Binding parameters comparison between yeast display mutant Fabs and mAbs binding in pH 6.0

| | | | | | | | | | Fab/mAb |
|---|---|---|---|---|---|---|---|---|---|
| Fab | Sorting | kₒₙ | k_{off} | K_{D} | mAb | kₒₙ | k_{off} | K_{D} | K_{D} |
| ID | population | (M⁻¹s⁻¹) | (s⁻¹) | (M) | ID | (M⁻¹s⁻¹) | (s⁻¹) | (M) | Ratio |
| 54BLH | 12 hours sort | 4.65 × 10⁶ | 1.01 × 10⁻⁴ | 2.17 × 10⁻¹¹ | 69BLH | 5.43 × 10⁶ | 6.18 × 10⁻⁵ | 1.14 × 10⁻¹¹ | 1.9 |
| 55BLH | 12 hours sort | 7.39 × 10⁶ | 2.48 × 10⁻³ | 3.35 × 10⁻¹⁰ | 70BLH | 8.47 × 10⁶ | 1.31 × 10⁻³ | 1.55 × 10⁻¹⁰ | 2.2 |
| 59BLH | 2 hour P1 | 7.08 × 10⁶ | 1.26 × 10⁻³ | 1.79 × 10⁻¹⁰ | 74BLH | 6.75 × 10⁶ | 8.92 × 10⁻⁴ | 1.33 × 10⁻¹⁰ | 1.3 |
| 60BLH | 2 hour P1 | 5.65 × 10⁶ | 1.67 × 10⁻³ | 2.96 × 10⁻¹⁰ | 75BLH | 6.86 × 10⁶ | 9.36 × 10⁻⁴ | 1.36 × 10⁻¹⁰ | 2.2 |
| 63BLH | 2 hour P2 | 7.51 × 10⁶ | 7.96 × 10⁻³ | 1.06 × 10⁻⁹ | 78BLH | 1.21 × 10⁷ | 3.99 × 10⁻³ | 3.31 × 10⁻¹⁰ | 3.2 |
| 64BLH | 2 hour P2 | 1.07 × 10⁷ | 1.94 × 10⁻³ | 1.82 × 10⁻¹⁰ | 79BLH | 1.12 × 10⁷ | 1.22 × 10⁻³ | 1.10 × 10⁻¹⁰ | 1.6 |
| 66BLH | 2 hour P3 | 1.96 × 10⁶ | 3.29 × 10⁻² | 1.68 × 10⁻⁸ | 81BLH | 5.65 × 10⁶ | 4.89 × 10⁻² | 9.11 × 10⁻⁹ | 1.8 |
| 67BLH | 2 hour P3 | 2.44 × 10⁶ | 4.60 × 10⁻² | 1.88 × 10⁻⁸ | 82BLH | 1.07 × 10⁷ | 3.65 × 10⁻² | 3.43 × 10⁻⁹ | 5.5 |

### Example 24. Epitope Competition Analysis of Yeast Display Mutants 74BLH and 81BLH Binding to Human LAP-TGFβ Isoform 1

[0866] This Example describes epitope competition analysis of yeast display mutant antibodies 74BLH and 81BLH on human LAP-TGFβ isoform 1 using Octet HTX instrument.

[0867] The epitope binning experiment was carried out via in-tandem format where 5 nM biotinylated human LAP-TGFβ1 was stably bound to the surface of streptavidin sensors (Sartorius, catalog 18-5021). The sensors were bound with primary antibody (mAb1) for 180 seconds at either 250 nM (74BLH) or 1000 nM (81BLH), to ensure full epitope saturation of human LAP-TGFβ1 followed by exposure to the secondary antibody (mAb2) for 180 seconds at either 250 nM (74BLH) or 1000 nM (81BLH). Neither antibody exhibited binding as mAB2 to human LAP-TGFβ1 when human LAP-TGFβ1 was pre-bound with that same antibody indicating fully saturated human LAP-TGFβ1. Antibodies were considered non-competitors of each other if they did not block each other's epitope on human LAP-TGFβ1 as demonstrated by >0.1 nm response for mAb2. Similarly, antibodies were considered competitors of each other if they blocked each other's epitope on human LAP-TGFβ1 as demonstrated by <0.1 nm response for mAb2.

[0868] As shown in FIG. 22A and FIG. 22B, yeast display mutants 74BLH and 81BLH exhibit competitive binding on human LAP-TGFβ1 since neither antibody exhibits >0.1 nm response as mAb2 when human LAP-TGFβ1 is pre-saturated with the alternate antibody as mAb1.

### Example 25. Cryo-Em Structural Analysis of Humanized Antibody 015BLM with LAP-TGFβ1

[0869] The structure of humanized affinity matured 015BLM Fab in complex with human LAP-TGFβ1 was determined by cryo-EM to identify the epitope on LAP-TGFβ1 to which the antibody binds, and the paratope of humanized 015BLM1-Fab.

### Sample and Grids Preparation.

[0870] Humanized 015BLM mAb (which has heavy and light chain variable region sequences of SEQ ID NOs: 2598 and 2613, respectively) and Fab, and GARP-LAP-TGFβ1 were generated as described in Examples above. GARP-LAP-TGFβ1 was supplied in buffer A (25 mM Tris, 150 mM NaCl, pH 8) and the 015BLM Fab was supplied in buffer B (20 mM sodium acetate, 9% sucrose, pH 5.5). The sample used for cryo-EM experiments was prepared by mixing 5 μl of GARP-LAP-TGFβ1 (16.7 μM) and 5 μl of 015BLM Fab (8.4 μM), incubated at room temperature for 5 minutes, then mixed with 10 μl of buffer A for a final concentration of 8.4 μM for GARP-LAP-TGFβ1 and 4.2 μM for the 015BLM Fab.

[0871] Grids (UltrAufoil 1.2/1.3, 300 mesh) were prepared using a Vitrobot mark IV device using standard procedures. Grids were glow discharged using a GloQube unit (Quorum Technologies) with the factory suggested values (0.1 mbar, 35 mA for 60 seconds). The Vitrobot device was set with a chamber humidity of 100%; a chamber temperature of 4° C.; a blot time of 2.5 sec; a wait time of 0 sec; a blot force of 10. A volume (3 μl) of sample were applied to the grid, blotted, and then plunged into a liquid ethane bath; the frozen grid was then transferred to liquid nitrogen (LN2) and kept at LN2 temperature for all subsequent steps (clipping, transferring to the microscope cassette, and data collection).

### Data Collection and Structure Determination.

[0872] The data set was collected on a Titan Krios microscope equipped with a K3 detector. Data collection was done using the EPU software. 4832 movies were collected at a nominal magnification of 81,000× in super-resolution counting mode; the defocus range was set to be between −1 and −3 μm. The physical detector pixel size was 1.086 Å and the total dose was 44.57 e⁻/Å².

### Data Processing and Map Reconstruction.

[0873] The entire data processing and map reconstruction was carried out with cryoSPARC software system. The initial particle picking identified 3.5 million (M) particles. After a number of 2D classification jobs, about 1.9 million (M) particles were used to calculate an initial map (nominal resolution 4.9 Ang). The particle stack was further cleaned up after CTF refinement and local motion correction using 3D classifications, and the resulting set of particles (836K particles) were used to generate a map that after a NU-refinement had a nominal resolution of 3.42 Ang. Local (masked) refinement was then used to improve the resolution at the epitope-paratope interface. The resulting map of the local refinement (after density subtraction) had a 3.3 Å overall resolution, in which the details at the interface were greatly improved. The final density map was then filtered based on local resolution estimates, ranging from 2.75 to 4.43 Å and then used to build the model.

### Model Building and Refinement.

[0874] All model building and refinement were carried out using Collaborative Computational Project for electron cryo-microscopy (CCPEM) software suite and Crystallographic Object-Oriented Toolkit (COOT). The complex between LAP-TGFβ1 and humanized 20E6 Fab was used as the starting model and was initially positioned into the map as rigid bodies using Chimera interactive molecular graphics program, and the density was used to truncate the model and assign the humanized 20E6 Fab sequences. The macromolecular crystallographic refinement program REFMAC refinement module with Jelly body restraints and manual curation in COOT was carried out to optimize the model geometry. Table 57 summarizes the model refinement and statistics:

TABLE 57
Model refinement and statistics

| Symmetry Imposed | C1 |
|---|---|
| Particle used | 836,182 |
| Map resolution (Å) | 3.32 |
| FSC threshold | 0.143 |
| Map Resolution Range (Å) | 2.75-4.43 |

Refinement

| | |
|---|---|
| Map sharpening B-factor (Å2) | −139 |

Model composition

| | |
|---|---|
| Non hydrogen Atoms | 8361 |
| Protein residues | 533 |

| | |
|---|---|
| rmsd (bonds) (Å): | 0.0026 |
| rmsd (angles) (º): | 0.9423 |
| All-atom clashscore | 5.74 |

Ramachandran plot:

| | |
|---|---|
| outliers: | 0.20% |
| allowed: | 7.42% |
| favored: | 92.38% |

| | |
|---|---|
| Rotamer outliers: | 4.35% |

[0875] The final model contained two chains for the LAP-TGFβ1 dimer (chain A residues 1-61+70-83+102-193+216-241+293-331 and chain B residues 263-297+325-361; numbering for antigen assumes absence of signal peptide, and one molecule (heavy chain (VH), residues 1-117 and light chain (VL), residues 2-106) for the 15BLM Fab. One sugar moiety NAG was modeled at one of the glycosylation sites (chain A residue 53). Table 58 summarizes the epitope and paratope of LAP-TGFβ1 and 15BLM-Fab.

TABLE 58
Epitope and paratope of LAP-TGFβ1 and 15BLM-Fab*

| VH | TGFβ1 | VL |
|---|---|---|
| | Arg274 | Tyr30 |
| | Gly278 | Tyr30 |
| | Trp279 | Tyr50 |
| | Lys280 | Asp92 |
| Tyr101 | Val341 | |
| Tyr101 | Gly342 | |
| Asp33, Arg50, Asp52, Ser55 | Arg343 | |
| Tyr101 | Lys344 | |
| VH | LAP | VL |
| | Leu25 | Arg53 |
| Tyr104 | Ala31 | Tyr49, Arg53 |
| Tyr101, Gly102, Tyr104 | Ser32 | Tyr49, Tyr50, Arg53 |
| Gly102 | Pro33 | Tyr32, Tyr50, Arg53 |
| Gly102 | Pro34 | Tyr32 |
| Trp99, Gly102, Gly103 | Ser35 | Tyr32, Gly91 |
| | Gln36 | Asp92 |
| | Gly37 | Asp92, Leu94, Trp96 |
| His35, Arg50, Lys59 | Glu38 | Leu94, Trp96 |

*Residues from 15BLM-Fab VH or VL that interact with LAP-TGFβ1 residues are indicated. Hydrogen bonding interactions are indicated in bold (interaction cut-off set to 4.5Å; hydrogen bond interactions cut-off set to 3.5 Å).

### Equivalents:

[0876] Those skilled in the art will recognize, or be able to ascertain using no more than routine experimentation, many equivalents of the specific embodiments disclosed herein. Such equivalents are intended to be encompassed by the following claims.

The application's sequence listing, which the Patent Office published only in electronic form, follows.

SEQUENCE LISTING (2653 sequences)

SEQ ID NO: 1 - protein, 629 aa, Artificial Sequence
  source: /note="Description of Artificial Sequence: Synthetic polypeptide"
MPPSGLRLLLLLLPLLWLLVLTPGRPAAGLSTCKTIDMELVKRKRIEAIRGQILSKLRLASPPSQGEVPPGPLPEAVLALYNSTRDRVAGESAEPEPEPEADYYAKEVTRVLMVETHNEIYDKFKQSTHSIYMFFNTSELREAVPEPVLLSRAELRLLRLKLKVEQHVELYQKYSNNSWRYLSNRLLAPSDSPEWLSFDVTGVVRQWLSRGGEIEGFRLSAHCSCDSRDNTLQVDINGFTTGRRGDLATIHGMNRPFLLLMATPLERAQHLQSSRHRRALDTNYCFSSTEKNCCVRQLYIDFRKDLGWKWIHEPKGYHANFCLGPCPYIWSLDTQYSKVLALYNQHNPGASAAPCCVPQALEPLPIVYYVGRKPKVEQLSNMIVRSCKCSGSTTENLYFQGSTGTHTCPPCPAPELLGGPSVFLFPPKPKDTLMISRTPEVTCVVVDVSHEDPEVKFNWYVDGVEVHNAKTKPREEQYNSTYRVVSVLTVLHQDWLNGKEYKCKVSNKALPAPIEKTISKAKGQPREPQVYTLPPSREEMTKNQVSLTCLVKGFYPSDIAVEWESNGQPENNYKTTPPVLDSDGSFFLYSKLTVDKSRWQQGNVFSCSVMHEALHNHYTQKSLSLSPGK

SEQ ID NO: 2 - protein, 661 aa, Artificial Sequence
  source: /note="Description of Artificial Sequence: Synthetic polypeptide"
MHYCVLSAFLILHLVTVALSLSTSSTLDMDQFMRKRIEAIRGQILSKLKLTSPPEDYPEPEEVPPEVISIYNSTRDLLQEKASRRAAACERERSDEEYYAKEVYKIDMPPFFPSENAIPPTFYRPYFRIVRFDVSAMEKNASNLVKAEFRVFRLQNPKARVPEQRIELYQILKSKDLTSPTQRYIDSKVVKTRAEGEWLSFDVTDAVHEWLHHKDRNLGFKISLHCPCCTFVPSNNYIIPNKSEELEARFAGIDGTSTYTSGDQKTIKSTRKKNSGKTPHLLLMLLPSYRLESQQTNRRKKSALDAAYCFRNVQDNCCLRPLYIDFKRDLGWKWIHEPKGYNANFCAGACPYLWSSDTQHSRVLSLYNTINPEASASPCCVSQDLEPLTILYYIGKTPKIEQLSNMIVKSCKCSGGGGSGGGGSGGGGSEPKSCDKTHTCPPCPAPELLGGPSVFLFPPKPKDTLMISRTPEVTCVVVDVSHEDPEVKFNWYVDGVEVHNAKTKPREEQYNSTYRVVSVLTVLHQDWLNGKEYKCKVSNKALPAPIEKTISKAKGQPREPQVYTLPPSREEMTKNQVSLTCLVKGFYPSDIAVEWESNGQPENNYKTTPPVLDSDGSFFLYSKLTVDKSRWQQGNVFSCSVMHEALHNHYTQKSLSLSPGK

SEQ ID NO: 3 - protein, 659 aa, Artificial Sequence
  source: /note="Description of Artificial Sequence: Synthetic polypeptide"
MKMHLQRALVVLALLNFATVSLSLSTCTTLDFGHIKKKRVEAIRGQILSKLRLTSPPEPTVMTHVPYQVLALYNSTRELLEEMHGEREEGCTQENTESEYYAKEIHKFDMIQGLAEHNELAVCPKGITSKVFRFNVSSVEKNRTNLFRAEFRVLRVPNPSSKRNEQRIELFQILRPDEHIAKQRYIGGKNLPTRGTAEWLSFDVTDTVREWLLRRESNLGLEISIHCPCHTFQPNGDILENIHEVMEIKFKGVDNEDDHGRGDLGRLKKQKDHHNPHLILMMIPPHRLDNPGQGGQRKKSALDTNYCFRNLEENCCVRPLYIDFRQDLGWKWVHEPKGYYANFCSGPCPYLRSADTTHSTVLGLYNTLNPEASASPCCVPQDLEPLTILYYVGRTPKVEQLSNMVVKSCKCSGGGGSGGGGSGGGGSEPKSCDKTHTCPPCPAPELLGGPSVFLFPPKPKDTLMISRTPEVTCVVVDVSHEDPEVKFNWYVDGVEVHNAKTKPREEQYNSTYRVVSVLTVLHQDWLNGKEYKCKVSNKALPAPIEKTISKAKGQPREPQVYTLPPSREEMTKNQVSLTCLVKGFYPSDIAVEWESNGQPENNYKTTPPVLDSDGSFFLYSKLTVDKSRWQQGNVFSCSVMHEALHNHYTQKSLSLSPGK

SEQ ID NO: 4 - protein, 629 aa, Artificial Sequence
  source: /note="Description of Artificial Sequence: Synthetic polypeptide"
MPPSGLRLLPLLLPLPWLLVLTPGRPAAGLSTCKTIDMELVKRKRIEAIRGQILSKLRLASPPSQGEVPPGPLPEAVLALYNSTRDRVAGESADPEPEPEADYYAKEVTRVLMVDRNNAIYEKTKDISHSIYMFFNTSDIREAVPEPPLLSRAELRLQRLKSSVEQHVELYQKYSNNSWRYLGNRLLTPTDTPEWLSFDVTGVVRQWLNQGDGIQGFRFSAHCSCDSKDNKLHVEINGISPKRRGDLGTIHDMNRPFLLLMATPLERAQHLHSSRHRRALDTNYCFSSTEKNCCVRQLYIDFRKDLGWKWIHEPKGYHANFCLGPCPYIWSLDTQYSKVLALYNQHNPGASASPCCVPQALEPLPIVYYVGRKPKVEQLSNMIVRSCKCSGSTTENLYFQGSTGTHTCPPCPAPELLGGPSVFLFPPKPKDTLMISRTPEVTCVVVDVSHEDPEVKFNWYVDGVEVHNAKTKPREEQYNSTYRVVSVLTVLHQDWLNGKEYKCKVSNKALPAPIEKTISKAKGQPREPQVYTLPPSREEMTKNQVSLTCLVKGFYPSDIAVEWESNGQPENNYKTTPPVLDSDGSFFLYSKLTVDKSRWQQGNVFSCSVMHEALHNHYTQKSLSLSPGK

SEQ ID NO: 5 - protein, 630 aa, Artificial Sequence
  source: /note="Description of Artificial Sequence: Synthetic polypeptide"
MPPSGLRLLLLLLPLLWLLVLTPGRPAAGLSTSKTIDMELVKRKRIEAIRGQILSKLRLASPPSQGEVPPGPLPEAVLALYNSTRDRVAGESADPEPEPEADYYAKEVTRVLMVDRNNAIYDKTKDITHSIYMFFNTSDIREAVPEPPLLSRAELRLQRFKSTVEQHVELYQKYSNNSWRYLGNRLLTPTDTPEWLSFDVTGVVRQWLNQGDGIQGFRFSAHCSCDSKDNVLHVEINGISPKRRGDLGTIHDMNRPFLLLMATPLERAQHLHSSRHRSALDTNYCFSSTEKNCCVRQLYIDFRKDLGWKWIHEPKGYHANFCLGPCPYIWSLDTQYSKVLALYNQHNPGASASPCCVPQALEPLPIVYYVGRKPKVEQLSNMIVRSCKCSGGGGSGGGGSGGGGSTHTCPPCPAPELLGGPSVFLFPPKPKDTLMISRTPEVTCVVVDVSHEDPEVKFNWYVDGVEVHNAKTKPREEQYNSTYRVVSVLTVLHQDWLNGKEYKCKVSNKALPAPIEKTISKAKGQPREPQVYTLPPSREEMTKNQVSLTCLVKGFYPSDIAVEWESNGQPENNYKTTPPVLDSDGSFFLYSKLTVDKSRWQQGNVFSCSVMHEALHNHYTQKSLSLSPGK

SEQ ID NO: 6 - protein, 629 aa, Artificial Sequence
  source: /note="Description of Artificial Sequence: Synthetic polypeptide"
MPPSGLRLLLLLLPLLWLLVLTPGRPAAGLSTSKTIDMELVKRKRIEAIRGQILSKLRLASPPSQGEVPPGPLPEAVLALYNSTRDRVAGESAEPEPEPEADYYAKEVTRVLMVETHNEIYDKFKQSTHSIYMFFNTSELREAVPEPVLLSRAELRLLRLKLKVEQHVELYQKYSNNSWRYLSNRLLAPSDSPEWLSFDVTGVVRQWLSRGGEIEGFRLSAHCSCDSKDNTLQVDINGFTTGRRGDLATIHGMNRPFLLLMATPLERAQHLQSSRHRRALDTNYCFSSTEKNCCVRQLYIDFRKDLGWKWIHEPKGYHANFCLGPCPYIWSLDTQYSKVLALYNQHNPGASAAPCCVPQALEPLPIVYYVGRKPKVEQLSNMIVRSCKCSGSTTENLYFQGSTGTHTCPPCPAPELLGGPSVFLFPPKPKDTLMISRTPEVTCVVVDVSHEDPEVKFNWYVDGVEVHNAKTKPREEQYNSTYRVVSVLTVLHQDWLNGKEYKCKVSNKALPAPIEKTISKAKGQPREPQVYTLPPSREEMTKNQVSLTCLVKGFYPSDIAVEWESNGQPENNYKTTPPVLDSDGSFFLYSKLTVDKSRWQQGNVFSCSVMHEALHNHYTQKSLSLSPGK

SEQ ID NO: 7 - protein, 438 aa, Artificial Sequence
  source: /note="Description of Artificial Sequence: Synthetic polypeptide"
MPPSGLRLLLLLLPLLWLLVLTPGRPAAGHHHHHHHHGGGSWSHPQFEKGGGSGGGSGGSSAWSHPQFEKENLYFQGLSTSKTIDMELVKRKRIEAIRGQILSKLRLASPPSQGEVPPGPLPEAVLALYNSTRDRVAGESAEPEPEPEADYYAKEVTRVLMVETHNEIYDKFKQSTHSIYMFFNTSELREAVPEPVLLSRAELRLLRLKLKVEQHVELYQKYSNNSWRYLSNRLLAPSDSPEWLSFDVTGVVRQWLSRGGEIEGFRLSAHCSCDSRDNTLQVDINGFTTGRRGDLATIHGMNRPFLLLMATPLERAQHLQSSRHRSALDTNYCFSSTEKNCCVRQLYIDFRKDLGWKWIHEPKGYHANFCLGPCPYIWSLDTQYSKVLALYNQHNPGASAAPCCVPQALEPLPIVYYVGRKPKVEQLSNMIVRSCKCS

SEQ ID NO: 8 - protein, 11 aa, Artificial Sequence
  source: /note="Description of Artificial Sequence: Synthetic peptide"
RASQDITNYLN

SEQ ID NO: 9 - protein, 7 aa, Artificial Sequence
  source: /note="Description of Artificial Sequence: Synthetic peptide"
YTSDLHS

SEQ ID NO: 10 - protein, 9 aa, Artificial Sequence
  source: /note="Description of Artificial Sequence: Synthetic peptide"
QQGDTLPWT

SEQ ID NO: 11 - protein, 107 aa, Artificial Sequence
  source: /note="Description of Artificial Sequence: Synthetic polypeptide"
DIQMTQSPSSLSASVGDRVTITCRASQDITNYLNWYQQKPGKAVKLLIYYTSDLHSGVPSRFSGSGSGTDYTLTISSLQPEDFATYFCQQGDTLPWTFGQGTKLEIK

SEQ ID NO: 12 - protein, 214 aa, Artificial Sequence
  source: /note="Description of Artificial Sequence: Synthetic polypeptide"
DIQMTQSPSSLSASVGDRVTITCRASQDITNYLNWYQQKPGKAVKLLIYYTSDLHSGVPSRFSGSGSGTDYTLTISSLQPEDFATYFCQQGDTLPWTFGQGTKLEIKRTVAAPSVFIFPPSDEQLKSGTASVVCLLNNFYPREAKVQWKVDNALQSGNSQESVTEQDSKDSTYSLSSTLTLSKADYEKHKVYACEVTHQGLSSPVTKSFNRGEC

SEQ ID NO: 13 - protein, 11 aa, Artificial Sequence
  source: /note="Description of Artificial Sequence: Synthetic peptide"
RASQDITNYLN

SEQ ID NO: 14 - protein, 7 aa, Artificial Sequence
  source: /note="Description of Artificial Sequence: Synthetic peptide"
YTSILHS

SEQ ID NO: 15 - protein, 9 aa, Artificial Sequence
  source: /note="Description of Artificial Sequence: Synthetic peptide"
QQGDTLPWT

SEQ ID NO: 16 - protein, 107 aa, Artificial Sequence
  source: /note="Description of Artificial Sequence: Synthetic polypeptide"
DIQMTQSPSSLSASVGDRVTITCRASQDITNYLNWYQQKPGKAVKLLIYYTSILHSGVPSRFSGSGSGTDYTLTISSLQPEDFATYFCQQGDTLPWTFGQGTKLEIK

SEQ ID NO: 17 - protein, 214 aa, Artificial Sequence
  source: /note="Description of Artificial Sequence: Synthetic polypeptide"
DIQMTQSPSSLSASVGDRVTITCRASQDITNYLNWYQQKPGKAVKLLIYYTSILHSGVPSRFSGSGSGTDYTLTISSLQPEDFATYFCQQGDTLPWTFGQGTKLEIKRTVAAPSVFIFPPSDEQLKSGTASVVCLLNNFYPREAKVQWKVDNALQSGNSQESVTEQDSKDSTYSLSSTLTLSKADYEKHKVYACEVTHQGLSSPVTKSFNRGEC

SEQ ID NO: 18 - protein, 11 aa, Artificial Sequence
  source: /note="Description of Artificial Sequence: Synthetic peptide"
RASQDITNYLN

SEQ ID NO: 19 - protein, 7 aa, Artificial Sequence
  source: /note="Description of Artificial Sequence: Synthetic peptide"
YTSELHS

SEQ ID NO: 20 - protein, 9 aa, Artificial Sequence
  source: /note="Description of Artificial Sequence: Synthetic peptide"
QQGDTLPWT

SEQ ID NO: 21 - protein, 107 aa, Artificial Sequence
  source: /note="Description of Artificial Sequence: Synthetic polypeptide"
DIQMTQSPSSLSASVGDRVTITCRASQDITNYLNWYQQKPGKAVKLLIYYTSELHSGVPSRFSGSGSGTDYTLTISSLQPEDFATYFCQQGDTLPWTFGQGTKLEIK

SEQ ID NO: 22 - protein, 214 aa, Artificial Sequence
  source: /note="Description of Artificial Sequence: Synthetic polypeptide"
DIQMTQSPSSLSASVGDRVTITCRASQDITNYLNWYQQKPGKAVKLLIYYTSELHSGVPSRFSGSGSGTDYTLTISSLQPEDFATYFCQQGDTLPWTFGQGTKLEIKRTVAAPSVFIFPPSDEQLKSGTASVVCLLNNFYPREAKVQWKVDNALQSGNSQESVTEQDSKDSTYSLSSTLTLSKADYEKHKVYACEVTHQGLSSPVTKSFNRGEC

SEQ ID NO: 23 - protein, 11 aa, Artificial Sequence
  source: /note="Description of Artificial Sequence: Synthetic peptide"
RASQDIENYLN

SEQ ID NO: 24 - protein, 7 aa, Artificial Sequence
  source: /note="Description of Artificial Sequence: Synthetic peptide"
YTSRLHS

SEQ ID NO: 25 - protein, 9 aa, Artificial Sequence
  source: /note="Description of Artificial Sequence: Synthetic peptide"
QQGDTLPWT

SEQ ID NO: 26 - protein, 107 aa, Artificial Sequence
  source: /note="Description of Artificial Sequence: Synthetic polypeptide"
DIQMTQSPSSLSASVGDRVTITCRASQDIENYLNWYQQKPGKAVKLLIYYTSRLHSGVPSRFSGSGSGTDYTLTISSLQPEDFATYFCQQGDTLPWTFGQGTKLEIK

SEQ ID NO: 27 - protein, 214 aa, Artificial Sequence
  source: /note="Description of Artificial Sequence: Synthetic polypeptide"
DIQMTQSPSSLSASVGDRVTITCRASQDIENYLNWYQQKPGKAVKLLIYYTSRLHSGVPSRFSGSGSGTDYTLTISSLQPEDFATYFCQQGDTLPWTFGQGTKLEIKRTVAAPSVFIFPPSDEQLKSGTASVVCLLNNFYPREAKVQWKVDNALQSGNSQESVTEQDSKDSTYSLSSTLTLSKADYEKHKVYACEVTHQGLSSPVTKSFNRGEC

SEQ ID NO: 28 - protein, 11 aa, Artificial Sequence
  source: /note="Description of Artificial Sequence: Synthetic peptide"
RASQDIDNYLN

SEQ ID NO: 29 - protein, 7 aa, Artificial Sequence
  source: /note="Description of Artificial Sequence: Synthetic peptide"
YTSRLHS

SEQ ID NO: 30 - protein, 9 aa, Artificial Sequence
  source: /note="Description of Artificial Sequence: Synthetic peptide"
QQGDTLPWT

SEQ ID NO: 31 - protein, 107 aa, Artificial Sequence
  source: /note="Description of Artificial Sequence: Synthetic polypeptide"
DIQMTQSPSSLSASVGDRVTITCRASQDIDNYLNWYQQKPGKAVKLLIYYTSRLHSGVPSRFSGSGSGTDYTLTISSLQPEDFATYFCQQGDTLPWTFGQGTKLEIK

SEQ ID NO: 32 - protein, 214 aa, Artificial Sequence
  source: /note="Description of Artificial Sequence: Synthetic polypeptide"
DIQMTQSPSSLSASVGDRVTITCRASQDIDNYLNWYQQKPGKAVKLLIYYTSRLHSGVPSRFSGSGSGTDYTLTISSLQPEDFATYFCQQGDTLPWTFGQGTKLEIKRTVAAPSVFIFPPSDEQLKSGTASVVCLLNNFYPREAKVQWKVDNALQSGNSQESVTEQDSKDSTYSLSSTLTLSKADYEKHKVYACEVTHQGLSSPVTKSFNRGEC

SEQ ID NO: 33 - protein, 11 aa, Artificial Sequence
  source: /note="Description of Artificial Sequence: Synthetic peptide"
RASQDITNYLN

SEQ ID NO: 34 - protein, 7 aa, Artificial Sequence
  source: /note="Description of Artificial Sequence: Synthetic peptide"
YTSRLHS

SEQ ID NO: 35 - protein, 9 aa, Artificial Sequence
  source: /note="Description of Artificial Sequence: Synthetic peptide"
QQGDTDPWT

SEQ ID NO: 36 - protein, 107 aa, Artificial Sequence
  source: /note="Description of Artificial Sequence: Synthetic polypeptide"
DIQMTQSPSSLSASVGDRVTITCRASQDITNYLNWYQQKPGKAVKLLIYYTSRLHSGVPSRFSGSGSGTDYTLTISSLQPEDFATYFCQQGDTDPWTFGQGTKLEIK

SEQ ID NO: 37 - protein, 214 aa, Artificial Sequence
  source: /note="Description of Artificial Sequence: Synthetic polypeptide"
DIQMTQSPSSLSASVGDRVTITCRASQDITNYLNWYQQKPGKAVKLLIYYTSRLHSGVPSRFSGSGSGTDYTLTISSLQPEDFATYFCQQGDTDPWTFGQGTKLEIKRTVAAPSVFIFPPSDEQLKSGTASVVCLLNNFYPREAKVQWKVDNALQSGNSQESVTEQDSKDSTYSLSSTLTLSKADYEKHKVYACEVTHQGLSSPVTKSFNRGEC

SEQ ID NO: 38 - protein, 11 aa, Artificial Sequence
  source: /note="Description of Artificial Sequence: Synthetic peptide"
RASQDITNYLN

SEQ ID NO: 39 - protein, 7 aa, Artificial Sequence
  source: /note="Description of Artificial Sequence: Synthetic peptide"
YTSRLHS

SEQ ID NO: 40 - protein, 9 aa, Artificial Sequence
  source: /note="Description of Artificial Sequence: Synthetic peptide"
QQGDTQPWT

SEQ ID NO: 41 - protein, 107 aa, Artificial Sequence
  source: /note="Description of Artificial Sequence: Synthetic polypeptide"
DIQMTQSPSSLSASVGDRVTITCRASQDITNYLNWYQQKPGKAVKLLIYYTSRLHSGVPSRFSGSGSGTDYTLTISSLQPEDFATYFCQQGDTQPWTFGQGTKLEIK

SEQ ID NO: 42 - protein, 214 aa, Artificial Sequence
  source: /note="Description of Artificial Sequence: Synthetic polypeptide"
DIQMTQSPSSLSASVGDRVTITCRASQDITNYLNWYQQKPGKAVKLLIYYTSRLHSGVPSRFSGSGSGTDYTLTISSLQPEDFATYFCQQGDTQPWTFGQGTKLEIKRTVAAPSVFIFPPSDEQLKSGTASVVCLLNNFYPREAKVQWKVDNALQSGNSQESVTEQDSKDSTYSLSSTLTLSKADYEKHKVYACEVTHQGLSSPVTKSFNRGEC

SEQ ID NO: 43 - protein, 5 aa, Artificial Sequence
  source: /note="Description of Artificial Sequence: Synthetic peptide"
KYWMH

SEQ ID NO: 44 - protein, 17 aa, Artificial Sequence
  source: /note="Description of Artificial Sequence: Synthetic peptide"
RIDPQSGGIKYAQKFQG

SEQ ID NO: 45 - protein, 9 aa, Artificial Sequence
  source: /note="Description of Artificial Sequence: Synthetic peptide"
WDYGGYFDV

SEQ ID NO: 46 - protein, 118 aa, Artificial Sequence
  source: /note="Description of Artificial Sequence: Synthetic polypeptide"
EVQLVQSGAEVKKPGASVKVSCKASGYTFTKYWMHWVRQAPGQGLEWMGRIDPQSGGIKYAQKFQGRATLTVDTSTSTAYMELSRLRSDDTAVYYCARWDYGGYFDVWGQGTLVTVSS

SEQ ID NO: 47 - protein, 226 aa, Artificial Sequence
  source: /note="Description of Artificial Sequence: Synthetic polypeptide"
EVQLVQSGAEVKKPGASVKVSCKASGYTFTKYWMHWVRQAPGQGLEWMGRIDPQSGGIKYAQKFQGRATLTVDTSTSTAYMELSRLRSDDTAVYYCARWDYGGYFDVWGQGTLVTVSSASTKGPSVFPLAPSSKSTSGGTAALGCLVKDYFPEPVTVSWNSGALTSGVHTFPAVLQSSGLYSLSSVVTVPSSSLGTQTYICNVNHKPSNTKVDKKVEPKSCDKTHT

SEQ ID NO: 48 - protein, 5 aa, Artificial Sequence
  source: /note="Description of Artificial Sequence: Synthetic peptide"
RYWMH

SEQ ID NO: 49 - protein, 17 aa, Artificial Sequence
  source: /note="Description of Artificial Sequence: Synthetic peptide"
RIDPQSGGIKYAQKFQG

SEQ ID NO: 50 - protein, 9 aa, Artificial Sequence
  source: /note="Description of Artificial Sequence: Synthetic peptide"
WDYGGYFDV

SEQ ID NO: 51 - protein, 118 aa, Artificial Sequence
  source: /note="Description of Artificial Sequence: Synthetic polypeptide"
EVQLVQSGAEVKKPGASVKVSCKASGYTFTRYWMHWVRQAPGQGLEWMGRIDPQSGGIKYAQKFQGRATLTVDTSTSTAYMELSRLRSDDTAVYYCARWDYGGYFDVWGQGTLVTVSS

SEQ ID NO: 52 - protein, 226 aa, Artificial Sequence
  source: /note="Description of Artificial Sequence: Synthetic polypeptide"
EVQLVQSGAEVKKPGASVKVSCKASGYTFTRYWMHWVRQAPGQGLEWMGRIDPQSGGIKYAQKFQGRATLTVDTSTSTAYMELSRLRSDDTAVYYCARWDYGGYFDVWGQGTLVTVSSASTKGPSVFPLAPSSKSTSGGTAALGCLVKDYFPEPVTVSWNSGALTSGVHTFPAVLQSSGLYSLSSVVTVPSSSLGTQTYICNVNHKPSNTKVDKKVEPKSCDKTHT

SEQ ID NO: 53 - protein, 5 aa, Artificial Sequence
  source: /note="Description of Artificial Sequence: Synthetic peptide"
SYWMR

SEQ ID NO: 54 - protein, 17 aa, Artificial Sequence
  source: /note="Description of Artificial Sequence: Synthetic peptide"
RIDPQSGGIKYAQKFQG

SEQ ID NO: 55 - protein, 9 aa, Artificial Sequence
  source: /note="Description of Artificial Sequence: Synthetic peptide"
WDYGGYFDV

SEQ ID NO: 56 - protein, 118 aa, Artificial Sequence
  source: /note="Description of Artificial Sequence: Synthetic polypeptide"
EVQLVQSGAEVKKPGASVKVSCKASGYTFTSYWMRWVRQAPGQGLEWMGRIDPQSGGIKYAQKFQGRATLTVDTSTSTAYMELSRLRSDDTAVYYCARWDYGGYFDVWGQGTLVTVSS

SEQ ID NO: 57 - protein, 226 aa, Artificial Sequence
  source: /note="Description of Artificial Sequence: Synthetic polypeptide"
EVQLVQSGAEVKKPGASVKVSCKASGYTFTSYWMRWVRQAPGQGLEWMGRIDPQSGGIKYAQKFQGRATLTVDTSTSTAYMELSRLRSDDTAVYYCARWDYGGYFDVWGQGTLVTVSSASTKGPSVFPLAPSSKSTSGGTAALGCLVKDYFPEPVTVSWNSGALTSGVHTFPAVLQSSGLYSLSSVVTVPSSSLGTQTYICNVNHKPSNTKVDKKVEPKSCDKTHT

SEQ ID NO: 58 - protein, 5 aa, Artificial Sequence
  source: /note="Description of Artificial Sequence: Synthetic peptide"
SYWMK

SEQ ID NO: 59 - protein, 17 aa, Artificial Sequence
  source: /note="Description of Artificial Sequence: Synthetic peptide"
RIDPQSGGIKYAQKFQG

SEQ ID NO: 60 - protein, 9 aa, Artificial Sequence
  source: /note="Description of Artificial Sequence: Synthetic peptide"
WDYGGYFDV

SEQ ID NO: 61 - protein, 118 aa, Artificial Sequence
  source: /note="Description of Artificial Sequence: Synthetic polypeptide"
EVQLVQSGAEVKKPGASVKVSCKASGYTFTSYWMKWVRQAPGQGLEWMGRIDPQSGGIKYAQKFQGRATLTVDTSTSTAYMELSRLRSDDTAVYYCARWDYGGYFDVWGQGTLVTVSS

SEQ ID NO: 62 - protein, 226 aa, Artificial Sequence
  source: /note="Description of Artificial Sequence: Synthetic polypeptide"
EVQLVQSGAEVKKPGASVKVSCKASGYTFTSYWMKWVRQAPGQGLEWMGRIDPQSGGIKYAQKFQGRATLTVDTSTSTAYMELSRLRSDDTAVYYCARWDYGGYFDVWGQGTLVTVSSASTKGPSVFPLAPSSKSTSGGTAALGCLVKDYFPEPVTVSWNSGALTSGVHTFPAVLQSSGLYSLSSVVTVPSSSLGTQTYICNVNHKPSNTKVDKKVEPKSCDKTHT

SEQ ID NO: 63 - protein, 5 aa, Artificial Sequence
  source: /note="Description of Artificial Sequence: Synthetic peptide"
SYWMH

SEQ ID NO: 64 - protein, 17 aa, Artificial Sequence
  source: /note="Description of Artificial Sequence: Synthetic peptide"
RIDPQEGGIKYAQKFQG

SEQ ID NO: 65 - protein, 9 aa, Artificial Sequence
  source: /note="Description of Artificial Sequence: Synthetic peptide"
WDYGGYFDV

SEQ ID NO: 66 - protein, 118 aa, Artificial Sequence
  source: /note="Description of Artificial Sequence: Synthetic polypeptide"
EVQLVQSGAEVKKPGASVKVSCKASGYTFTSYWMHWVRQAPGQGLEWMGRIDPQEGGIKYAQKFQGRATLTVDTSTSTAYMELSRLRSDDTAVYYCARWDYGGYFDVWGQGTLVTVSS

SEQ ID NO: 67 - protein, 226 aa, Artificial Sequence
  source: /note="Description of Artificial Sequence: Synthetic polypeptide"
EVQLVQSGAEVKKPGASVKVSCKASGYTFTSYWMHWVRQAPGQGLEWMGRIDPQEGGIKYAQKFQGRATLTVDTSTSTAYMELSRLRSDDTAVYYCARWDYGGYFDVWGQGTLVTVSSASTKGPSVFPLAPSSKSTSGGTAALGCLVKDYFPEPVTVSWNSGALTSGVHTFPAVLQSSGLYSLSSVVTVPSSSLGTQTYICNVNHKPSNTKVDKKVEPKSCDKTHT

SEQ ID NO: 68 - protein, 5 aa, Artificial Sequence
  source: /note="Description of Artificial Sequence: Synthetic peptide"
SYWMH

SEQ ID NO: 69 - protein, 17 aa, Artificial Sequence
  source: /note="Description of Artificial Sequence: Synthetic peptide"
RIDPQSGEIKYAQKFQG

SEQ ID NO: 70 - protein, 9 aa, Artificial Sequence
  source: /note="Description of Artificial Sequence: Synthetic peptide"
WDYGGYFDV

SEQ ID NO: 71 - protein, 118 aa, Artificial Sequence
  source: /note="Description of Artificial Sequence: Synthetic polypeptide"
EVQLVQSGAEVKKPGASVKVSCKASGYTFTSYWMHWVRQAPGQGLEWMGRIDPQSGEIKYAQKFQGRATLTVDTSTSTAYMELSRLRSDDTAVYYCARWDYGGYFDVWGQGTLVTVSS

SEQ ID NO: 72 - protein, 226 aa, Artificial Sequence
  source: /note="Description of Artificial Sequence: Synthetic polypeptide"
EVQLVQSGAEVKKPGASVKVSCKASGYTFTSYWMHWVRQAPGQGLEWMGRIDPQSGEIKYAQKFQGRATLTVDTSTSTAYMELSRLRSDDTAVYYCARWDYGGYFDVWGQGTLVTVSSASTKGPSVFPLAPSSKSTSGGTAALGCLVKDYFPEPVTVSWNSGALTSGVHTFPAVLQSSGLYSLSSVVTVPSSSLGTQTYICNVNHKPSNTKVDKKVEPKSCDKTHT

SEQ ID NO: 73 - protein, 5 aa, Artificial Sequence
  source: /note="Description of Artificial Sequence: Synthetic peptide"
SYWMH

SEQ ID NO: 74 - protein, 17 aa, Artificial Sequence
  source: /note="Description of Artificial Sequence: Synthetic peptide"
RIDPQSGDIKYAQKFQG

SEQ ID NO: 75 - protein, 9 aa, Artificial Sequence
  source: /note="Description of Artificial Sequence: Synthetic peptide"
WDYGGYFDV

SEQ ID NO: 76 - protein, 118 aa, Artificial Sequence
  source: /note="Description of Artificial Sequence: Synthetic polypeptide"
EVQLVQSGAEVKKPGASVKVSCKASGYTFTSYWMHWVRQAPGQGLEWMGRIDPQSGDIKYAQKFQGRATLTVDTSTSTAYMELSRLRSDDTAVYYCARWDYGGYFDVWGQGTLVTVSS

SEQ ID NO: 77 - protein, 226 aa, Artificial Sequence
  source: /note="Description of Artificial Sequence: Synthetic polypeptide"
EVQLVQSGAEVKKPGASVKVSCKASGYTFTSYWMHWVRQAPGQGLEWMGRIDPQSGDIKYAQKFQGRATLTVDTSTSTAYMELSRLRSDDTAVYYCARWDYGGYFDVWGQGTLVTVSSASTKGPSVFPLAPSSKSTSGGTAALGCLVKDYFPEPVTVSWNSGALTSGVHTFPAVLQSSGLYSLSSVVTVPSSSLGTQTYICNVNHKPSNTKVDKKVEPKSCDKTHT

SEQ ID NO: 78 - protein, 5 aa, Artificial Sequence
  source: /note="Description of Artificial Sequence: Synthetic peptide"
SYWMH

SEQ ID NO: 79 - protein, 17 aa, Artificial Sequence
  source: /note="Description of Artificial Sequence: Synthetic peptide"
RIDPQSGGIWYAQKFQG

SEQ ID NO: 80 - protein, 9 aa, Artificial Sequence
  source: /note="Description of Artificial Sequence: Synthetic peptide"
WDYGGYFDV

SEQ ID NO: 81 - protein, 118 aa, Artificial Sequence
  source: /note="Description of Artificial Sequence: Synthetic polypeptide"
EVQLVQSGAEVKKPGASVKVSCKASGYTFTSYWMHWVRQAPGQGLEWMGRIDPQSGGIWYAQKFQGRATLTVDTSTSTAYMELSRLRSDDTAVYYCARWDYGGYFDVWGQGTLVTVSS

SEQ ID NO: 82 - protein, 226 aa, Artificial Sequence
  source: /note="Description of Artificial Sequence: Synthetic polypeptide"
EVQLVQSGAEVKKPGASVKVSCKASGYTFTSYWMHWVRQAPGQGLEWMGRIDPQSGGIWYAQKFQGRATLTVDTSTSTAYMELSRLRSDDTAVYYCARWDYGGYFDVWGQGTLVTVSSASTKGPSVFPLAPSSKSTSGGTAALGCLVKDYFPEPVTVSWNSGALTSGVHTFPAVLQSSGLYSLSSVVTVPSSSLGTQTYICNVNHKPSNTKVDKKVEPKSCDKTHT

SEQ ID NO: 83 - protein, 5 aa, Artificial Sequence
  source: /note="Description of Artificial Sequence: Synthetic peptide"
SYWMH

SEQ ID NO: 84 - protein, 17 aa, Artificial Sequence
  source: /note="Description of Artificial Sequence: Synthetic peptide"
RIDPQSGGIQYAQKFQG

SEQ ID NO: 85 - protein, 9 aa, Artificial Sequence
  source: /note="Description of Artificial Sequence: Synthetic peptide"
WDYGGYFDV

SEQ ID NO: 86 - protein, 118 aa, Artificial Sequence
  source: /note="Description of Artificial Sequence: Synthetic polypeptide"
EVQLVQSGAEVKKPGASVKVSCKASGYTFTSYWMHWVRQAPGQGLEWMGRIDPQSGGIQYAQKFQGRATLTVDTSTSTAYMELSRLRSDDTAVYYCARWDYGGYFDVWGQGTLVTVSS

SEQ ID NO: 87 - protein, 226 aa, Artificial Sequence
  source: /note="Description of Artificial Sequence: Synthetic polypeptide"
EVQLVQSGAEVKKPGASVKVSCKASGYTFTSYWMHWVRQAPGQGLEWMGRIDPQSGGIQYAQKFQGRATLTVDTSTSTAYMELSRLRSDDTAVYYCARWDYGGYFDVWGQGTLVTVSSASTKGPSVFPLAPSSKSTSGGTAALGCLVKDYFPEPVTVSWNSGALTSGVHTFPAVLQSSGLYSLSSVVTVPSSSLGTQTYICNVNHKPSNTKVDKKVEPKSCDKTHT

SEQ ID NO: 88 - protein, 5 aa, Artificial Sequence
  source: /note="Description of Artificial Sequence: Synthetic peptide"
SYWMH

SEQ ID NO: 89 - protein, 17 aa, Artificial Sequence
  source: /note="Description of Artificial Sequence: Synthetic peptide"
RIDPQSGGIKYAQKFQG

SEQ ID NO: 90 - protein, 9 aa, Artificial Sequence
  source: /note="Description of Artificial Sequence: Synthetic peptide"
WDYSGYFDV

SEQ ID NO: 91 - protein, 118 aa, Artificial Sequence
  source: /note="Description of Artificial Sequence: Synthetic polypeptide"
EVQLVQSGAEVKKPGASVKVSCKASGYTFTSYWMHWVRQAPGQGLEWMGRIDPQSGGIKYAQKFQGRATLTVDTSTSTAYMELSRLRSDDTAVYYCARWDYSGYFDVWGQGTLVTVSS

SEQ ID NO: 92 - protein, 226 aa, Artificial Sequence
  source: /note="Description of Artificial Sequence: Synthetic polypeptide"
EVQLVQSGAEVKKPGASVKVSCKASGYTFTSYWMHWVRQAPGQGLEWMGRIDPQSGGIKYAQKFQGRATLTVDTSTSTAYMELSRLRSDDTAVYYCARWDYSGYFDVWGQGTLVTVSSASTKGPSVFPLAPSSKSTSGGTAALGCLVKDYFPEPVTVSWNSGALTSGVHTFPAVLQSSGLYSLSSVVTVPSSSLGTQTYICNVNHKPSNTKVDKKVEPKSCDKTHT

SEQ ID NO: 93 - protein, 14 aa, Artificial Sequence
  source: /note="Description of Artificial Sequence: Synthetic peptide"
GSTTENLYFQGSTG

SEQ ID NO: 94 - protein, 15 aa, Artificial Sequence
  source: /note="Description of Artificial Sequence: Synthetic peptide"
GGGGSGGGGSGGGGS

SEQ ID NO: 95 - protein, 5 aa, Artificial Sequence
  source: /note="Description of Artificial Sequence: Synthetic peptide"
SYWMH

SEQ ID NO: 96 - protein, 17 aa, Artificial Sequence
  source: /note="Description of Artificial Sequence: Synthetic peptide"
RIDPQSGGIKYAQKFQG

SEQ ID NO: 97 - protein, 9 aa, Artificial Sequence
  source: /note="Description of Artificial Sequence: Synthetic peptide"
WDYGGYFDV

SEQ ID NO: 98 - protein, 118 aa, Artificial Sequence
  source: /note="Description of Artificial Sequence: Synthetic polypeptide"
EVQLVQSGAEVKKPGASVKVSCKASGYTFTSYWMHWVRQAPGQGLEWMGRIDPQSGGIKYAQKFQGRATLTVDTSTSTAYMELSRLRSDDTAVYYCARWDYGGYFDVWGQGTLVTVSS

SEQ ID NO: 99 - protein, 226 aa, Artificial Sequence
  source: /note="Description of Artificial Sequence: Synthetic polypeptide"
EVQLVQSGAEVKKPGASVKVSCKASGYTFTSYWMHWVRQAPGQGLEWMGRIDPQSGGIKYAQKFQGRATLTVDTSTSTAYMELSRLRSDDTAVYYCARWDYGGYFDVWGQGTLVTVSSASTKGPSVFPLAPSSKSTSGGTAALGCLVKDYFPEPVTVSWNSGALTSGVHTFPAVLQSSGLYSLSSVVTVPSSSLGTQTYICNVNHKPSNTKVDKKVEPKSCDKTHT

SEQ ID NO: 100 - protein, 11 aa, Artificial Sequence
  source: /note="Description of Artificial Sequence: Synthetic peptide"
YASQDITNYLN

SEQ ID NO: 101 - protein, 7 aa, Artificial Sequence
  source: /note="Description of Artificial Sequence: Synthetic peptide"
YTSRLHS

SEQ ID NO: 102 - protein, 9 aa, Artificial Sequence
  source: /note="Description of Artificial Sequence: Synthetic peptide"
QQGDTLPWT

SEQ ID NO: 103 - protein, 107 aa, Artificial Sequence
  source: /note="Description of Artificial Sequence: Synthetic polypeptide"
DIQMTQSPSSLSASVGDRVTITCYASQDITNYLNWYQQKPGKAVKLLIYYTSRLHSGVPSRFSGSGSGTDYTLTISSLQPEDFATYFCQQGDTLPWTFGQGTKLEIK

SEQ ID NO: 104 - protein, 214 aa, Artificial Sequence
  source: /note="Description of Artificial Sequence: Synthetic polypeptide"
DIQMTQSPSSLSASVGDRVTITCYASQDITNYLNWYQQKPGKAVKLLIYYTSRLHSGVPSRFSGSGSGTDYTLTISSLQPEDFATYFCQQGDTLPWTFGQGTKLEIKRTVAAPSVFIFPPSDEQLKSGTASVVCLLNNFYPREAKVQWKVDNALQSGNSQESVTEQDSKDSTYSLSSTLTLSKADYEKHKVYACEVTHQGLSSPVTKSFNRGEC

SEQ ID NO: 105 - protein, 5 aa, Artificial Sequence
  source: /note="Description of Artificial Sequence: Synthetic peptide"
SYWMH

SEQ ID NO: 106 - protein, 17 aa, Artificial Sequence
  source: /note="Description of Artificial Sequence: Synthetic peptide"
RIDPQSGGIKYAQKFQG

SEQ ID NO: 107 - protein, 9 aa, Artificial Sequence
  source: /note="Description of Artificial Sequence: Synthetic peptide"
WDYGGYFDV

SEQ ID NO: 108 - protein, 118 aa, Artificial Sequence; identical to SEQ ID NO: 98
  source: /note="Description of Artificial Sequence: Synthetic polypeptide"

SEQ ID NO: 109 - protein, 226 aa, Artificial Sequence; identical to SEQ ID NO: 99
  source: /note="Description of Artificial Sequence: Synthetic polypeptide"

SEQ ID NO: 110 - protein, 11 aa, Artificial Sequence
  source: /note="Description of Artificial Sequence: Synthetic peptide"
RYSQDITNYLN

SEQ ID NO: 111 - protein, 7 aa, Artificial Sequence
  source: /note="Description of Artificial Sequence: Synthetic peptide"
YTSRLHS

SEQ ID NO: 112 - protein, 9 aa, Artificial Sequence
  source: /note="Description of Artificial Sequence: Synthetic peptide"
QQGDTLPWT

SEQ ID NO: 113 - protein, 107 aa, Artificial Sequence
  source: /note="Description of Artificial Sequence: Synthetic polypeptide"
DIQMTQSPSSLSASVGDRVTITCRYSQDITNYLNWYQQKPGKAVKLLIYYTSRLHSGVPSRFSGSGSGTDYTLTISSLQPEDFATYFCQQGDTLPWTFGQGTKLEIK

SEQ ID NO: 114 - protein, 214 aa, Artificial Sequence
  source: /note="Description of Artificial Sequence: Synthetic polypeptide"
DIQMTQSPSSLSASVGDRVTITCRYSQDITNYLNWYQQKPGKAVKLLIYYTSRLHSGVPSRFSGSGSGTDYTLTISSLQPEDFATYFCQQGDTLPWTFGQGTKLEIKRTVAAPSVFIFPPSDEQLKSGTASVVCLLNNFYPREAKVQWKVDNALQSGNSQESVTEQDSKDSTYSLSSTLTLSKADYEKHKVYACEVTHQGLSSPVTKSFNRGEC

SEQ ID NO: 115 - protein, 5 aa, Artificial Sequence
  source: /note="Description of Artificial Sequence: Synthetic peptide"
SYWMH

SEQ ID NO: 116 - protein, 17 aa, Artificial Sequence
  source: /note="Description of Artificial Sequence: Synthetic peptide"
RIDPQSGGIKYAQKFQG

SEQ ID NO: 117 - protein, 9 aa, Artificial Sequence
  source: /note="Description of Artificial Sequence: Synthetic peptide"
WDYGGYFDV

SEQ ID NO: 118 - protein, 118 aa, Artificial Sequence; identical to SEQ ID NO: 98
  source: /note="Description of Artificial Sequence: Synthetic polypeptide"

SEQ ID NO: 119 - protein, 226 aa, Artificial Sequence; identical to SEQ ID NO: 99
  source: /note="Description of Artificial Sequence: Synthetic polypeptide"

SEQ ID NO: 120 - protein, 11 aa, Artificial Sequence
  source: /note="Description of Artificial Sequence: Synthetic peptide"
RAYQDITNYLN

SEQ ID NO: 121 - protein, 7 aa, Artificial Sequence
  source: /note="Description of Artificial Sequence: Synthetic peptide"
YTSRLHS

SEQ ID NO: 122 - protein, 9 aa, Artificial Sequence
  source: /note="Description of Artificial Sequence: Synthetic peptide"
QQGDTLPWT

SEQ ID NO: 123 - protein, 107 aa, Artificial Sequence
  source: /note="Description of Artificial Sequence: Synthetic polypeptide"
DIQMTQSPSSLSASVGDRVTITCRAYQDITNYLNWYQQKPGKAVKLLIYYTSRLHSGVPSRFSGSGSGTDYTLTISSLQPEDFATYFCQQGDTLPWTFGQGTKLEIK

SEQ ID NO: 124 - protein, 214 aa, Artificial Sequence
  source: /note="Description of Artificial Sequence: Synthetic polypeptide"
DIQMTQSPSSLSASVGDRVTITCRAYQDITNYLNWYQQKPGKAVKLLIYYTSRLHSGVPSRFSGSGSGTDYTLTISSLQPEDFATYFCQQGDTLPWTFGQGTKLEIKRTVAAPSVFIFPPSDEQLKSGTASVVCLLNNFYPREAKVQWKVDNALQSGNSQESVTEQDSKDSTYSLSSTLTLSKADYEKHKVYACEVTHQGLSSPVTKSFNRGEC

SEQ ID NO: 125 - protein, 5 aa, Artificial Sequence
  source: /note="Description of Artificial Sequence: Synthetic peptide"
SYWMH

SEQ ID NO: 126 - protein, 17 aa, Artificial Sequence
  source: /note="Description of Artificial Sequence: Synthetic peptide"
RIDPQSGGIKYAQKFQG

SEQ ID NO: 127 - protein, 9 aa, Artificial Sequence
  source: /note="Description of Artificial Sequence: Synthetic peptide"
WDYGGYFDV

SEQ ID NO: 128 - protein, 118 aa, Artificial Sequence; identical to SEQ ID NO: 98
  source: /note="Description of Artificial Sequence: Synthetic polypeptide"

SEQ ID NO: 129 - protein, 226 aa, Artificial Sequence; identical to SEQ ID NO: 99
  source: /note="Description of Artificial Sequence: Synthetic polypeptide"

SEQ ID NO: 130 - protein, 11 aa, Artificial Sequence
  source: /note="Description of Artificial Sequence: Synthetic peptide"
RASYDITNYLN

SEQ ID NO: 131 - protein, 7 aa, Artificial Sequence
  source: /note="Description of Artificial Sequence: Synthetic peptide"
YTSRLHS

SEQ ID NO: 132 - protein, 9 aa, Artificial Sequence
  source: /note="Description of Artificial Sequence: Synthetic peptide"
QQGDTLPWT

SEQ ID NO: 133 - protein, 107 aa, Artificial Sequence
  source: /note="Description of Artificial Sequence: Synthetic polypeptide"
DIQMTQSPSSLSASVGDRVTITCRASYDITNYLNWYQQKPGKAVKLLIYYTSRLHSGVPSRFSGSGSGTDYTLTISSLQPEDFATYFCQQGDTLPWTFGQGTKLEIK

SEQ ID NO: 134 - protein, 214 aa, Artificial Sequence
  source: /note="Description of Artificial Sequence: Synthetic polypeptide"
DIQMTQSPSSLSASVGDRVTITCRASYDITNYLNWYQQKPGKAVKLLIYYTSRLHSGVPSRFSGSGSGTDYTLTISSLQPEDFATYFCQQGDTLPWTFGQGTKLEIKRTVAAPSVFIFPPSDEQLKSGTASVVCLLNNFYPREAKVQWKVDNALQSGNSQESVTEQDSKDSTYSLSSTLTLSKADYEKHKVYACEVTHQGLSSPVTKSFNRGEC

SEQ ID NO: 135 - protein, 5 aa, Artificial Sequence
  source: /note="Description of Artificial Sequence: Synthetic peptide"
SYWMH

SEQ ID NO: 136 - protein, 17 aa, Artificial Sequence
  source: /note="Description of Artificial Sequence: Synthetic peptide"
RIDPQSGGIKYAQKFQG

SEQ ID NO: 137 - protein, 9 aa, Artificial Sequence
  source: /note="Description of Artificial Sequence: Synthetic peptide"
WDYGGYFDV

SEQ ID NO: 138 - protein, 118 aa, Artificial Sequence; identical to SEQ ID NO: 98
  source: /note="Description of Artificial Sequence: Synthetic polypeptide"

SEQ ID NO: 139 - protein, 226 aa, Artificial Sequence; identical to SEQ ID NO: 99
  source: /note="Description of Artificial Sequence: Synthetic polypeptide"

SEQ ID NO: 140 - protein, 11 aa, Artificial Sequence
  source: /note="Description of Artificial Sequence: Synthetic peptide"
RASQYITNYLN

SEQ ID NO: 141 - protein, 7 aa, Artificial Sequence
  source: /note="Description of Artificial Sequence: Synthetic peptide"
YTSRLHS

SEQ ID NO: 142 - protein, 9 aa, Artificial Sequence
  source: /note="Description of Artificial Sequence: Synthetic peptide"
QQGDTLPWT

SEQ ID NO: 143 - protein, 107 aa, Artificial Sequence
  source: /note="Description of Artificial Sequence: Synthetic polypeptide"
DIQMTQSPSSLSASVGDRVTITCRASQYITNYLNWYQQKPGKAVKLLIYYTSRLHSGVPSRFSGSGSGTDYTLTISSLQPEDFATYFCQQGDTLPWTFGQGTKLEIK

SEQ ID NO: 144 - protein, 214 aa, Artificial Sequence
  source: /note="Description of Artificial Sequence: Synthetic polypeptide"
DIQMTQSPSSLSASVGDRVTITCRASQYITNYLNWYQQKPGKAVKLLIYYTSRLHSGVPSRFSGSGSGTDYTLTISSLQPEDFATYFCQQGDTLPWTFGQGTKLEIKRTVAAPSVFIFPPSDEQLKSGTASVVCLLNNFYPREAKVQWKVDNALQSGNSQESVTEQDSKDSTYSLSSTLTLSKADYEKHKVYACEVTHQGLSSPVTKSFNRGEC

SEQ ID NO: 145 - protein, 5 aa, Artificial Sequence
  source: /note="Description of Artificial Sequence: Synthetic peptide"
SYWMH

SEQ ID NO: 146 - protein, 17 aa, Artificial Sequence
  source: /note="Description of Artificial Sequence: Synthetic peptide"
RIDPQSGGIKYAQKFQG

SEQ ID NO: 147 - protein, 9 aa, Artificial Sequence
  source: /note="Description of Artificial Sequence: Synthetic peptide"
WDYGGYFDV

SEQ ID NO: 148 - protein, 118 aa, Artificial Sequence; identical to SEQ ID NO: 98
  source: /note="Description of Artificial Sequence: Synthetic polypeptide"

SEQ ID NO: 149 - protein, 226 aa, Artificial Sequence; identical to SEQ ID NO: 99
  source: /note="Description of Artificial Sequence: Synthetic polypeptide"

SEQ ID NO: 150 - protein, 11 aa, Artificial Sequence
  source: /note="Description of Artificial Sequence: Synthetic peptide"
RASQDYTNYLN

SEQ ID NO: 151 - protein, 7 aa, Artificial Sequence
  source: /note="Description of Artificial Sequence: Synthetic peptide"
YTSRLHS

SEQ ID NO: 152 - protein, 9 aa, Artificial Sequence
  source: /note="Description of Artificial Sequence: Synthetic peptide"
QQGDTLPWT

SEQ ID NO: 153 - protein, 107 aa, Artificial Sequence
  source: /note="Description of Artificial Sequence: Synthetic polypeptide"
DIQMTQSPSSLSASVGDRVTITCRASQDYTNYLNWYQQKPGKAVKLLIYYTSRLHSGVPSRFSGSGSGTDYTLTISSLQPEDFATYFCQQGDTLPWTFGQGTKLEIK

SEQ ID NO: 154 - protein, 214 aa, Artificial Sequence
  source: /note="Description of Artificial Sequence: Synthetic polypeptide"
DIQMTQSPSSLSASVGDRVTITCRASQDYTNYLNWYQQKPGKAVKLLIYYTSRLHSGVPSRFSGSGSGTDYTLTISSLQPEDFATYFCQQGDTLPWTFGQGTKLEIKRTVAAPSVFIFPPSDEQLKSGTASVVCLLNNFYPREAKVQWKVDNALQSGNSQESVTEQDSKDSTYSLSSTLTLSKADYEKHKVYACEVTHQGLSSPVTKSFNRGEC

SEQ ID NO: 155 - protein, 5 aa, Artificial Sequence
  source: /note="Description of Artificial Sequence: Synthetic peptide"
SYWMH

SEQ ID NO: 156 - protein, 17 aa, Artificial Sequence
  source: /note="Description of Artificial Sequence: Synthetic peptide"
RIDPQSGGIKYAQKFQG

SEQ ID NO: 157 - protein, 9 aa, Artificial Sequence
  source: /note="Description of Artificial Sequence: Synthetic peptide"
WDYGGYFDV

SEQ ID NO: 158 - protein, 118 aa, Artificial Sequence; identical to SEQ ID NO: 98
  source: /note="Description of Artificial Sequence: Synthetic polypeptide"

SEQ ID NO: 159 - protein, 226 aa, Artificial Sequence; identical to SEQ ID NO: 99
  source: /note="Description of Artificial Sequence: Synthetic polypeptide"

SEQ ID NO: 160 - protein, 11 aa, Artificial Sequence
  source: /note="Description of Artificial Sequence: Synthetic peptide"
RASQDIYNYLN

SEQ ID NO: 161 - protein, 7 aa, Artificial Sequence
  source: /note="Description of Artificial Sequence: Synthetic peptide"
YTSRLHS

SEQ ID NO: 162 - protein, 9 aa, Artificial Sequence
  source: /note="Description of Artificial Sequence: Synthetic peptide"
QQGDTLPWT

SEQ ID NO: 163 - protein, 107 aa, Artificial Sequence
  source: /note="Description of Artificial Sequence: Synthetic polypeptide"
DIQMTQSPSSLSASVGDRVTITCRASQDIYNYLNWYQQKPGKAVKLLIYYTSRLHSGVPSRFSGSGSGTDYTLTISSLQPEDFATYFCQQGDTLPWTFGQGTKLEIK

SEQ ID NO: 164 - protein, 214 aa, Artificial Sequence
  source: /note="Description of Artificial Sequence: Synthetic polypeptide"
DIQMTQSPSSLSASVGDRVTITCRASQDIYNYLNWYQQKPGKAVKLLIYYTSRLHSGVPSRFSGSGSGTDYTLTISSLQPEDFATYFCQQGDTLPWTFGQGTKLEIKRTVAAPSVFIFPPSDEQLKSGTASVVCLLNNFYPREAKVQWKVDNALQSGNSQESVTEQDSKDSTYSLSSTLTLSKADYEKHKVYACEVTHQGLSSPVTKSFNRGEC

SEQ ID NO: 165 - protein, 5 aa, Artificial Sequence
  source: /note="Description of Artificial Sequence: Synthetic peptide"
SYWMH

SEQ ID NO: 166 - protein, 17 aa, Artificial Sequence
  source: /note="Description of Artificial Sequence: Synthetic peptide"
RIDPQSGGIKYAQKFQG

SEQ ID NO: 167 - protein, 9 aa, Artificial Sequence
  source: /note="Description of Artificial Sequence: Synthetic peptide"
WDYGGYFDV

SEQ ID NO: 168 - protein, 118 aa, Artificial Sequence; identical to SEQ ID NO: 98
  source: /note="Description of Artificial Sequence: Synthetic polypeptide"

SEQ ID NO: 169 - protein, 226 aa, Artificial Sequence; identical to SEQ ID NO: 99
  source: /note="Description of Artificial Sequence: Synthetic polypeptide"

SEQ ID NO: 170 - protein, 11 aa, Artificial Sequence
  source: /note="Description of Artificial Sequence: Synthetic peptide"
RASQDITYYLN

SEQ ID NO: 171 - protein, 7 aa, Artificial Sequence
  source: /note="Description of Artificial Sequence: Synthetic peptide"
YTSRLHS

SEQ ID NO: 172 - protein, 9 aa, Artificial Sequence
  source: /note="Description of Artificial Sequence: Synthetic peptide"
QQGDTLPWT

SEQ ID NO: 173 - protein, 107 aa, Artificial Sequence
  source: /note="Description of Artificial Sequence: Synthetic polypeptide"
DIQMTQSPSSLSASVGDRVTITCRASQDITYYLNWYQQKPGKAVKLLIYYTSRLHSGVPSRFSGSGSGTDYTLTISSLQPEDFATYFCQQGDTLPWTFGQGTKLEIK

SEQ ID NO: 174 - protein, 214 aa, Artificial Sequence
  source: /note="Description of Artificial Sequence: Synthetic polypeptide"
DIQMTQSPSSLSASVGDRVTITCRASQDITYYLNWYQQKPGKAVKLLIYYTSRLHSGVPSRFSGSGSGTDYTLTISSLQPEDFATYFCQQGDTLPWTFGQGTKLEIKRTVAAPSVFIFPPSDEQLKSGTASVVCLLNNFYPREAKVQWKVDNALQSGNSQESVTEQDSKDSTYSLSSTLTLSKADYEKHKVYACEVTHQGLSSPVTKSFNRGEC

SEQ ID NO: 175 - protein, 5 aa, Artificial Sequence
  source: /note="Description of Artificial Sequence: Synthetic peptide"
SYWMH

SEQ ID NO: 176 - protein, 17 aa, Artificial Sequence
  source: /note="Description of Artificial Sequence: Synthetic peptide"
RIDPQSGGIKYAQKFQG

SEQ ID NO: 177 - protein, 9 aa, Artificial Sequence
  source: /note="Description of Artificial Sequence: Synthetic peptide"
WDYGGYFDV

SEQ ID NO: 178 - protein, 118 aa, Artificial Sequence; identical to SEQ ID NO: 98
  source: /note="Description of Artificial Sequence: Synthetic polypeptide"

SEQ ID NO: 179 - protein, 226 aa, Artificial Sequence; identical to SEQ ID NO: 99
  source: /note="Description of Artificial Sequence: Synthetic polypeptide"

SEQ ID NO: 180 - protein, 11 aa, Artificial Sequence
  source: /note="Description of Artificial Sequence: Synthetic peptide"
RASQDITNYYN

SEQ ID NO: 181 - protein, 7 aa, Artificial Sequence
  source: /note="Description of Artificial Sequence: Synthetic peptide"
YTSRLHS

SEQ ID NO: 182 - protein, 9 aa, Artificial Sequence
  source: /note="Description of Artificial Sequence: Synthetic peptide"
QQGDTLPWT

SEQ ID NO: 183 - protein, 107 aa, Artificial Sequence
  source: /note="Description of Artificial Sequence: Synthetic polypeptide"
DIQMTQSPSSLSASVGDRVTITCRASQDITNYYNWYQQKPGKAVKLLIYYTSRLHSGVPSRFSGSGSGTDYTLTISSLQPEDFATYFCQQGDTLPWTFGQGTKLEIK

SEQ ID NO: 184 - protein, 214 aa, Artificial Sequence
  source: /note="Description of Artificial Sequence: Synthetic polypeptide"
DIQMTQSPSSLSASVGDRVTITCRASQDITNYYNWYQQKPGKAVKLLIYYTSRLHSGVPSRFSGSGSGTDYTLTISSLQPEDFATYFCQQGDTLPWTFGQGTKLEIKRTVAAPSVFIFPPSDEQLKSGTASVVCLLNNFYPREAKVQWKVDNALQSGNSQESVTEQDSKDSTYSLSSTLTLSKADYEKHKVYACEVTHQGLSSPVTKSFNRGEC

SEQ ID NO: 185 - protein, 5 aa, Artificial Sequence
  source: /note="Description of Artificial Sequence: Synthetic peptide"
SYWMH

SEQ ID NO: 186 - protein, 17 aa, Artificial Sequence
  source: /note="Description of Artificial Sequence: Synthetic peptide"
RIDPQSGGIKYAQKFQG

SEQ ID NO: 187 - protein, 9 aa, Artificial Sequence
  source: /note="Description of Artificial Sequence: Synthetic peptide"
WDYGGYFDV

SEQ ID NO: 188 - protein, 118 aa, Artificial Sequence; identical to SEQ ID NO: 98
  source: /note="Description of Artificial Sequence: Synthetic polypeptide"

SEQ ID NO: 189 - protein, 226 aa, Artificial Sequence; identical to SEQ ID NO: 99
  source: /note="Description of Artificial Sequence: Synthetic polypeptide"

SEQ ID NO: 190 - protein, 11 aa, Artificial Sequence
  source: /note="Description of Artificial Sequence: Synthetic peptide"
RASQDITNYLY

SEQ ID NO: 191 - protein, 7 aa, Artificial Sequence
  source: /note="Description of Artificial Sequence: Synthetic peptide"
YTSRLHS

SEQ ID NO: 192 - protein, 9 aa, Artificial Sequence
  source: /note="Description of Artificial Sequence: Synthetic peptide"
QQGDTLPWT

SEQ ID NO: 193 - protein, 107 aa, Artificial Sequence
  source: /note="Description of Artificial Sequence: Synthetic polypeptide"
DIQMTQSPSSLSASVGDRVTITCRASQDITNYLYWYQQKPGKAVKLLIYYTSRLHSGVPSRFSGSGSGTDYTLTISSLQPEDFATYFCQQGDTLPWTFGQGTKLEIK

SEQ ID NO: 194 - protein, 214 aa, Artificial Sequence
  source: /note="Description of Artificial Sequence: Synthetic polypeptide"
DIQMTQSPSSLSASVGDRVTITCRASQDITNYLYWYQQKPGKAVKLLIYYTSRLHSGVPSRFSGSGSGTDYTLTISSLQPEDFATYFCQQGDTLPWTFGQGTKLEIKRTVAAPSVFIFPPSDEQLKSGTASVVCLLNNFYPREAKVQWKVDNALQSGNSQESVTEQDSKDSTYSLSSTLTLSKADYEKHKVYACEVTHQGLSSPVTKSFNRGEC

SEQ ID NO: 195 - protein, 5 aa, Artificial Sequence
  source: /note="Description of Artificial Sequence: Synthetic peptide"
SYWMH

SEQ ID NO: 196 - protein, 17 aa, Artificial Sequence
  source: /note="Description of Artificial Sequence: Synthetic peptide"
RIDPQSGGIKYAQKFQG

SEQ ID NO: 197 - protein, 9 aa, Artificial Sequence
  source: /note="Description of Artificial Sequence: Synthetic peptide"
WDYGGYFDV

SEQ ID NO: 198 - protein, 118 aa, Artificial Sequence; identical to SEQ ID NO: 98
  source: /note="Description of Artificial Sequence: Synthetic polypeptide"

SEQ ID NO: 199 - protein, 226 aa, Artificial Sequence; identical to SEQ ID NO: 99
  source: /note="Description of Artificial Sequence: Synthetic polypeptide"

SEQ ID NO: 200 - protein, 11 aa, Artificial Sequence
  source: /note="Description of Artificial Sequence: Synthetic peptide"
RASQDITNYLN

SEQ ID NO: 201 - protein, 7 aa, Artificial Sequence
  source: /note="Description of Artificial Sequence: Synthetic peptide"
YYSRLHS

SEQ ID NO: 202 - protein, 9 aa, Artificial Sequence
  source: /note="Description of Artificial Sequence: Synthetic peptide"
QQGDTLPWT

SEQ ID NO: 203 - protein, 107 aa, Artificial Sequence
  source: /note="Description of Artificial Sequence: Synthetic polypeptide"
DIQMTQSPSSLSASVGDRVTITCRASQDITNYLNWYQQKPGKAVKLLIYYYSRLHSGVPSRFSGSGSGTDYTLTISSLQPEDFATYFCQQGDTLPWTFGQGTKLEIK

SEQ ID NO: 204 - protein, 214 aa, Artificial Sequence
  source: /note="Description of Artificial Sequence: Synthetic polypeptide"
DIQMTQSPSSLSASVGDRVTITCRASQDITNYLNWYQQKPGKAVKLLIYYYSRLHSGVPSRFSGSGSGTDYTLTISSLQPEDFATYFCQQGDTLPWTFGQGTKLEIKRTVAAPSVFIFPPSDEQLKSGTASVVCLLNNFYPREAKVQWKVDNALQSGNSQESVTEQDSKDSTYSLSSTLTLSKADYEKHKVYACEVTHQGLSSPVTKSFNRGEC

SEQ ID NO: 205 - protein, 5 aa, Artificial Sequence
  source: /note="Description of Artificial Sequence: Synthetic peptide"
SYWMH

SEQ ID NO: 206 - protein, 17 aa, Artificial Sequence
  source: /note="Description of Artificial Sequence: Synthetic peptide"
RIDPQSGGIKYAQKFQG

SEQ ID NO: 207 - protein, 9 aa, Artificial Sequence
  source: /note="Description of Artificial Sequence: Synthetic peptide"
WDYGGYFDV

SEQ ID NO: 208 - protein, 118 aa, Artificial Sequence; identical to SEQ ID NO: 98
  source: /note="Description of Artificial Sequence: Synthetic polypeptide"

SEQ ID NO: 209 - protein, 226 aa, Artificial Sequence; identical to SEQ ID NO: 99
  source: /note="Description of Artificial Sequence: Synthetic polypeptide"

SEQ ID NO: 210 - protein, 11 aa, Artificial Sequence
  source: /note="Description of Artificial Sequence: Synthetic peptide"
RASQDITNYLN

SEQ ID NO: 211 - protein, 7 aa, Artificial Sequence
  source: /note="Description of Artificial Sequence: Synthetic peptide"
YTYRLHS

SEQ ID NO: 212 - protein, 9 aa, Artificial Sequence
  source: /note="Description of Artificial Sequence: Synthetic peptide"
QQGDTLPWT

SEQ ID NO: 213 - protein, 107 aa, Artificial Sequence
  source: /note="Description of Artificial Sequence: Synthetic polypeptide"
DIQMTQSPSSLSASVGDRVTITCRASQDITNYLNWYQQKPGKAVKLLIYYTYRLHSGVPSRFSGSGSGTDYTLTISSLQPEDFATYFCQQGDTLPWTFGQGTKLEIK

SEQ ID NO: 214 - protein, 214 aa, Artificial Sequence
  source: /note="Description of Artificial Sequence: Synthetic polypeptide"
DIQMTQSPSSLSASVGDRVTITCRASQDITNYLNWYQQKPGKAVKLLIYYTYRLHSGVPSRFSGSGSGTDYTLTISSLQPEDFATYFCQQGDTLPWTFGQGTKLEIKRTVAAPSVFIFPPSDEQLKSGTASVVCLLNNFYPREAKVQWKVDNALQSGNSQESVTEQDSKDSTYSLSSTLTLSKADYEKHKVYACEVTHQGLSSPVTKSFNRGEC

SEQ ID NO: 215 - protein, 5 aa, Artificial Sequence
  source: /note="Description of Artificial Sequence: Synthetic peptide"
SYWMH

SEQ ID NO: 216 - protein, 17 aa, Artificial Sequence
  source: /note="Description of Artificial Sequence: Synthetic peptide"
RIDPQSGGIKYAQKFQG

SEQ ID NO: 217 - protein, 9 aa, Artificial Sequence
  source: /note="Description of Artificial Sequence: Synthetic peptide"
WDYGGYFDV

SEQ ID NO: 218 - protein, 118 aa, Artificial Sequence; identical to SEQ ID NO: 98
  source: /note="Description of Artificial Sequence: Synthetic polypeptide"

SEQ ID NO: 219 - protein, 226 aa, Artificial Sequence; identical to SEQ ID NO: 99
  source: /note="Description of Artificial Sequence: Synthetic polypeptide"

SEQ ID NO: 220 - protein, 11 aa, Artificial Sequence
  source: /note="Description of Artificial Sequence: Synthetic peptide"
RASQDITNYLN

SEQ ID NO: 221 - protein, 7 aa, Artificial Sequence
  source: /note="Description of Artificial Sequence: Synthetic peptide"
YTSYLHS

SEQ ID NO: 222 - protein, 9 aa, Artificial Sequence
  source: /note="Description of Artificial Sequence: Synthetic peptide"
QQGDTLPWT

SEQ ID NO: 223 - protein, 107 aa, Artificial Sequence
  source: /note="Description of Artificial Sequence: Synthetic polypeptide"
DIQMTQSPSSLSASVGDRVTITCRASQDITNYLNWYQQKPGKAVKLLIYYTSYLHSGVPSRFSGSGSGTDYTLTISSLQPEDFATYFCQQGDTLPWTFGQGTKLEIK

SEQ ID NO: 224 - protein, 214 aa, Artificial Sequence
  source: /note="Description of Artificial Sequence: Synthetic polypeptide"
DIQMTQSPSSLSASVGDRVTITCRASQDITNYLNWYQQKPGKAVKLLIYYTSYLHSGVPSRFSGSGSGTDYTLTISSLQPEDFATYFCQQGDTLPWTFGQGTKLEIKRTVAAPSVFIFPPSDEQLKSGTASVVCLLNNFYPREAKVQWKVDNALQSGNSQESVTEQDSKDSTYSLSSTLTLSKADYEKHKVYACEVTHQGLSSPVTKSFNRGEC

SEQ ID NO: 225 - protein, 5 aa, Artificial Sequence
  source: /note="Description of Artificial Sequence: Synthetic peptide"
SYWMH

SEQ ID NO: 226 - protein, 17 aa, Artificial Sequence
  source: /note="Description of Artificial Sequence: Synthetic peptide"
RIDPQSGGIKYAQKFQG

SEQ ID NO: 227 - protein, 9 aa, Artificial Sequence
  source: /note="Description of Artificial Sequence: Synthetic peptide"
WDYGGYFDV

SEQ ID NO: 228 - protein, 118 aa, Artificial Sequence; identical to SEQ ID NO: 98
  source: /note="Description of Artificial Sequence: Synthetic polypeptide"

SEQ ID NO: 229 - protein, 226 aa, Artificial Sequence; identical to SEQ ID NO: 99
  source: /note="Description of Artificial Sequence: Synthetic polypeptide"

SEQ ID NO: 230 - protein, 11 aa, Artificial Sequence
  source: /note="Description of Artificial Sequence: Synthetic peptide"
RASQDITNYLN

SEQ ID NO: 231 - protein, 7 aa, Artificial Sequence
  source: /note="Description of Artificial Sequence: Synthetic peptide"
YTSRYHS

SEQ ID NO: 232 - protein, 9 aa, Artificial Sequence
  source: /note="Description of Artificial Sequence: Synthetic peptide"
QQGDTLPWT

SEQ ID NO: 233 - protein, 107 aa, Artificial Sequence
  source: /note="Description of Artificial Sequence: Synthetic polypeptide"
DIQMTQSPSSLSASVGDRVTITCRASQDITNYLNWYQQKPGKAVKLLIYYTSRYHSGVPSRFSGSGSGTDYTLTISSLQPEDFATYFCQQGDTLPWTFGQGTKLEIK

SEQ ID NO: 234 - protein, 214 aa, Artificial Sequence
  source: /note="Description of Artificial Sequence: Synthetic polypeptide"
DIQMTQSPSSLSASVGDRVTITCRASQDITNYLNWYQQKPGKAVKLLIYYTSRYHSGVPSRFSGSGSGTDYTLTISSLQPEDFATYFCQQGDTLPWTFGQGTKLEIKRTVAAPSVFIFPPSDEQLKSGTASVVCLLNNFYPREAKVQWKVDNALQSGNSQESVTEQDSKDSTYSLSSTLTLSKADYEKHKVYACEVTHQGLSSPVTKSFNRGEC

SEQ ID NO: 235 - protein, 5 aa, Artificial Sequence
  source: /note="Description of Artificial Sequence: Synthetic peptide"
SYWMH

SEQ ID NO: 236 - protein, 17 aa, Artificial Sequence
  source: /note="Description of Artificial Sequence: Synthetic peptide"
RIDPQSGGIKYAQKFQG

SEQ ID NO: 237 - protein, 9 aa, Artificial Sequence
  source: /note="Description of Artificial Sequence: Synthetic peptide"
WDYGGYFDV

SEQ ID NO: 238 - protein, 118 aa, Artificial Sequence; identical to SEQ ID NO: 98
  source: /note="Description of Artificial Sequence: Synthetic polypeptide"

SEQ ID NO: 239 - protein, 226 aa, Artificial Sequence; identical to SEQ ID NO: 99
  source: /note="Description of Artificial Sequence: Synthetic polypeptide"

SEQ ID NO: 240 - protein, 11 aa, Artificial Sequence
  source: /note="Description of Artificial Sequence: Synthetic peptide"
RASQDITNYLN

SEQ ID NO: 241 - protein, 7 aa, Artificial Sequence
  source: /note="Description of Artificial Sequence: Synthetic peptide"
YTSRLYS

SEQ ID NO: 242 - protein, 9 aa, Artificial Sequence
  source: /note="Description of Artificial Sequence: Synthetic peptide"
QQGDTLPWT

SEQ ID NO: 243 - protein, 107 aa, Artificial Sequence
  source: /note="Description of Artificial Sequence: Synthetic polypeptide"
DIQMTQSPSSLSASVGDRVTITCRASQDITNYLNWYQQKPGKAVKLLIYYTSRLYSGVPSRFSGSGSGTDYTLTISSLQPEDFATYFCQQGDTLPWTFGQGTKLEIK

SEQ ID NO: 244 - protein, 214 aa, Artificial Sequence
  source: /note="Description of Artificial Sequence: Synthetic polypeptide"
DIQMTQSPSSLSASVGDRVTITCRASQDITNYLNWYQQKPGKAVKLLIYYTSRLYSGVPSRFSGSGSGTDYTLTISSLQPEDFATYFCQQGDTLPWTFGQGTKLEIKRTVAAPSVFIFPPSDEQLKSGTASVVCLLNNFYPREAKVQWKVDNALQSGNSQESVTEQDSKDSTYSLSSTLTLSKADYEKHKVYACEVTHQGLSSPVTKSFNRGEC

SEQ ID NO: 245 - protein, 5 aa, Artificial Sequence
  source: /note="Description of Artificial Sequence: Synthetic peptide"
SYWMH

SEQ ID NO: 246 - protein, 17 aa, Artificial Sequence
  source: /note="Description of Artificial Sequence: Synthetic peptide"
RIDPQSGGIKYAQKFQG

SEQ ID NO: 247 - protein, 9 aa, Artificial Sequence
  source: /note="Description of Artificial Sequence: Synthetic peptide"
WDYGGYFDV

SEQ ID NO: 248 - protein, 118 aa, Artificial Sequence; identical to SEQ ID NO: 98
  source: /note="Description of Artificial Sequence: Synthetic polypeptide"

SEQ ID NO: 249 - protein, 226 aa, Artificial Sequence; identical to SEQ ID NO: 99
  source: /note="Description of Artificial Sequence: Synthetic polypeptide"

SEQ ID NO: 250 - protein, 11 aa, Artificial Sequence
  source: /note="Description of Artificial Sequence: Synthetic peptide"
RASQDITNYLN

SEQ ID NO: 251 - protein, 7 aa, Artificial Sequence
  source: /note="Description of Artificial Sequence: Synthetic peptide"
YTSRLHY

SEQ ID NO: 252 - protein, 9 aa, Artificial Sequence
  source: /note="Description of Artificial Sequence: Synthetic peptide"
QQGDTLPWT

SEQ ID NO: 253 - protein, 107 aa, Artificial Sequence
  source: /note="Description of Artificial Sequence: Synthetic polypeptide"
DIQMTQSPSSLSASVGDRVTITCRASQDITNYLNWYQQKPGKAVKLLIYYTSRLHYGVPSRFSGSGSGTDYTLTISSLQPEDFATYFCQQGDTLPWTFGQGTKLEIK

SEQ ID NO: 254 - protein, 214 aa, Artificial Sequence
  source: /note="Description of Artificial Sequence: Synthetic polypeptide"
DIQMTQSPSSLSASVGDRVTITCRASQDITNYLNWYQQKPGKAVKLLIYYTSRLHYGVPSRFSGSGSGTDYTLTISSLQPEDFATYFCQQGDTLPWTFGQGTKLEIKRTVAAPSVFIFPPSDEQLKSGTASVVCLLNNFYPREAKVQWKVDNALQSGNSQESVTEQDSKDSTYSLSSTLTLSKADYEKHKVYACEVTHQGLSSPVTKSFNRGEC

SEQ ID NO: 255 - protein, 5 aa, Artificial Sequence
  source: /note="Description of Artificial Sequence: Synthetic peptide"
SYWMH

SEQ ID NO: 256 - protein, 17 aa, Artificial Sequence
  source: /note="Description of Artificial Sequence: Synthetic peptide"
RIDPQSGGIKYAQKFQG

SEQ ID NO: 257 - protein, 9 aa, Artificial Sequence
  source: /note="Description of Artificial Sequence: Synthetic peptide"
WDYGGYFDV

SEQ ID NO: 258 - protein, 118 aa, Artificial Sequence; identical to SEQ ID NO: 98
  source: /note="Description of Artificial Sequence: Synthetic polypeptide"

SEQ ID NO: 259 - protein, 226 aa, Artificial Sequence; identical to SEQ ID NO: 99
  source: /note="Description of Artificial Sequence: Synthetic polypeptide"

SEQ ID NO: 260 - protein, 11 aa, Artificial Sequence
  source: /note="Description of Artificial Sequence: Synthetic peptide"
RASQDITNYLN

SEQ ID NO: 261 - protein, 7 aa, Artificial Sequence
  source: /note="Description of Artificial Sequence: Synthetic peptide"
YTSRLHS

SEQ ID NO: 262 - protein, 9 aa, Artificial Sequence
  source: /note="Description of Artificial Sequence: Synthetic peptide"
YQGDTLPWT

SEQ ID NO: 263 - protein, 107 aa, Artificial Sequence
  source: /note="Description of Artificial Sequence: Synthetic polypeptide"
DIQMTQSPSSLSASVGDRVTITCRASQDITNYLNWYQQKPGKAVKLLIYYTSRLHSGVPSRFSGSGSGTDYTLTISSLQPEDFATYFCYQGDTLPWTFGQGTKLEIK

SEQ ID NO: 264 - protein, 214 aa, Artificial Sequence
  source: /note="Description of Artificial Sequence: Synthetic polypeptide"
DIQMTQSPSSLSASVGDRVTITCRASQDITNYLNWYQQKPGKAVKLLIYYTSRLHSGVPSRFSGSGSGTDYTLTISSLQPEDFATYFCYQGDTLPWTFGQGTKLEIKRTVAAPSVFIFPPSDEQLKSGTASVVCLLNNFYPREAKVQWKVDNALQSGNSQESVTEQDSKDSTYSLSSTLTLSKADYEKHKVYACEVTHQGLSSPVTKSFNRGEC

SEQ ID NO: 265 - protein, 5 aa, Artificial Sequence
  source: /note="Description of Artificial Sequence: Synthetic peptide"
SYWMH

SEQ ID NO: 266 - protein, 17 aa, Artificial Sequence
  source: /note="Description of Artificial Sequence: Synthetic peptide"
RIDPQSGGIKYAQKFQG

SEQ ID NO: 267 - protein, 9 aa, Artificial Sequence
  source: /note="Description of Artificial Sequence: Synthetic peptide"
WDYGGYFDV

SEQ ID NO: 268 - protein, 118 aa, Artificial Sequence; identical to SEQ ID NO: 98
  source: /note="Description of Artificial Sequence: Synthetic polypeptide"

SEQ ID NO: 269 - protein, 226 aa, Artificial Sequence; identical to SEQ ID NO: 99
  source: /note="Description of Artificial Sequence: Synthetic polypeptide"

SEQ ID NO: 270 - protein, 11 aa, Artificial Sequence
  source: /note="Description of Artificial Sequence: Synthetic peptide"
RASQDITNYLN

SEQ ID NO: 271 - protein, 7 aa, Artificial Sequence
  source: /note="Description of Artificial Sequence: Synthetic peptide"
YTSRLHS

SEQ ID NO: 272 - protein, 9 aa, Artificial Sequence
  source: /note="Description of Artificial Sequence: Synthetic peptide"
QYGDTLPWT

SEQ ID NO: 273 - protein, 107 aa, Artificial Sequence
  source: /note="Description of Artificial Sequence: Synthetic polypeptide"
DIQMTQSPSSLSASVGDRVTITCRASQDITNYLNWYQQKPGKAVKLLIYYTSRLHSGVPSRFSGSGSGTDYTLTISSLQPEDFATYFCQYGDTLPWTFGQGTKLEIK

SEQ ID NO: 274 - protein, 214 aa, Artificial Sequence
  source: /note="Description of Artificial Sequence: Synthetic polypeptide"
DIQMTQSPSSLSASVGDRVTITCRASQDITNYLNWYQQKPGKAVKLLIYYTSRLHSGVPSRFSGSGSGTDYTLTISSLQPEDFATYFCQYGDTLPWTFGQGTKLEIKRTVAAPSVFIFPPSDEQLKSGTASVVCLLNNFYPREAKVQWKVDNALQSGNSQESVTEQDSKDSTYSLSSTLTLSKADYEKHKVYACEVTHQGLSSPVTKSFNRGEC

SEQ ID NO: 275 - protein, 5 aa, Artificial Sequence
  source: /note="Description of Artificial Sequence: Synthetic peptide"
SYWMH

SEQ ID NO: 276 - protein, 17 aa, Artificial Sequence
  source: /note="Description of Artificial Sequence: Synthetic peptide"
RIDPQSGGIKYAQKFQG

SEQ ID NO: 277 - protein, 9 aa, Artificial Sequence
  source: /note="Description of Artificial Sequence: Synthetic peptide"
WDYGGYFDV

SEQ ID NO: 278 - protein, 118 aa, Artificial Sequence; identical to SEQ ID NO: 98
  source: /note="Description of Artificial Sequence: Synthetic polypeptide"

SEQ ID NO: 279 - protein, 226 aa, Artificial Sequence; identical to SEQ ID NO: 99
  source: /note="Description of Artificial Sequence: Synthetic polypeptide"

SEQ ID NO: 280 - protein, 11 aa, Artificial Sequence
  source: /note="Description of Artificial Sequence: Synthetic peptide"
RASQDITNYLN

SEQ ID NO: 281 - protein, 7 aa, Artificial Sequence
  source: /note="Description of Artificial Sequence: Synthetic peptide"
YTSRLHS

SEQ ID NO: 282 - protein, 9 aa, Artificial Sequence
  source: /note="Description of Artificial Sequence: Synthetic peptide"
QQYDTLPWT

SEQ ID NO: 283 - protein, 107 aa, Artificial Sequence
  source: /note="Description of Artificial Sequence: Synthetic polypeptide"
DIQMTQSPSSLSASVGDRVTITCRASQDITNYLNWYQQKPGKAVKLLIYYTSRLHSGVPSRFSGSGSGTDYTLTISSLQPEDFATYFCQQYDTLPWTFGQGTKLEIK

SEQ ID NO: 284 - protein, 214 aa, Artificial Sequence
  source: /note="Description of Artificial Sequence: Synthetic polypeptide"
DIQMTQSPSSLSASVGDRVTITCRASQDITNYLNWYQQKPGKAVKLLIYYTSRLHSGVPSRFSGSGSGTDYTLTISSLQPEDFATYFCQQYDTLPWTFGQGTKLEIKRTVAAPSVFIFPPSDEQLKSGTASVVCLLNNFYPREAKVQWKVDNALQSGNSQESVTEQDSKDSTYSLSSTLTLSKADYEKHKVYACEVTHQGLSSPVTKSFNRGEC

SEQ ID NO: 285 - protein, 5 aa, Artificial Sequence
  source: /note="Description of Artificial Sequence: Synthetic peptide"
SYWMH

SEQ ID NO: 286 - protein, 17 aa, Artificial Sequence
  source: /note="Description of Artificial Sequence: Synthetic peptide"
RIDPQSGGIKYAQKFQG

SEQ ID NO: 287 - protein, 9 aa, Artificial Sequence
  source: /note="Description of Artificial Sequence: Synthetic peptide"
WDYGGYFDV

SEQ ID NO: 288 - protein, 118 aa, Artificial Sequence; identical to SEQ ID NO: 98
  source: /note="Description of Artificial Sequence: Synthetic polypeptide"

SEQ ID NO: 289 - protein, 226 aa, Artificial Sequence; identical to SEQ ID NO: 99
  source: /note="Description of Artificial Sequence: Synthetic polypeptide"

SEQ ID NO: 290 - protein, 11 aa, Artificial Sequence
  source: /note="Description of Artificial Sequence: Synthetic peptide"
RASQDITNYLN

SEQ ID NO: 291 - protein, 7 aa, Artificial Sequence
  source: /note="Description of Artificial Sequence: Synthetic peptide"
YTSRLHS

SEQ ID NO: 292 - protein, 9 aa, Artificial Sequence
  source: /note="Description of Artificial Sequence: Synthetic peptide"
QQGYTLPWT

SEQ ID NO: 293 - protein, 107 aa, Artificial Sequence
  source: /note="Description of Artificial Sequence: Synthetic polypeptide"
DIQMTQSPSSLSASVGDRVTITCRASQDITNYLNWYQQKPGKAVKLLIYYTSRLHSGVPSRFSGSGSGTDYTLTISSLQPEDFATYFCQQGYTLPWTFGQGTKLEIK

SEQ ID NO: 294 - protein, 214 aa, Artificial Sequence
  source: /note="Description of Artificial Sequence: Synthetic polypeptide"
DIQMTQSPSSLSASVGDRVTITCRASQDITNYLNWYQQKPGKAVKLLIYYTSRLHSGVPSRFSGSGSGTDYTLTISSLQPEDFATYFCQQGYTLPWTFGQGTKLEIKRTVAAPSVFIFPPSDEQLKSGTASVVCLLNNFYPREAKVQWKVDNALQSGNSQESVTEQDSKDSTYSLSSTLTLSKADYEKHKVYACEVTHQGLSSPVTKSFNRGEC

SEQ ID NO: 295 - protein, 5 aa, Artificial Sequence
  source: /note="Description of Artificial Sequence: Synthetic peptide"
SYWMH

SEQ ID NO: 296 - protein, 17 aa, Artificial Sequence
  source: /note="Description of Artificial Sequence: Synthetic peptide"
RIDPQSGGIKYAQKFQG

SEQ ID NO: 297 - protein, 9 aa, Artificial Sequence
  source: /note="Description of Artificial Sequence: Synthetic peptide"
WDYGGYFDV

SEQ ID NO: 298 - protein, 118 aa, Artificial Sequence; identical to SEQ ID NO: 98
  source: /note="Description of Artificial Sequence: Synthetic polypeptide"

SEQ ID NO: 299 - protein, 226 aa, Artificial Sequence; identical to SEQ ID NO: 99
  source: /note="Description of Artificial Sequence: Synthetic polypeptide"

SEQ ID NO: 300 - protein, 11 aa, Artificial Sequence
  source: /note="Description of Artificial Sequence: Synthetic peptide"
RASQDITNYLN

SEQ ID NO: 301 - protein, 7 aa, Artificial Sequence
  source: /note="Description of Artificial Sequence: Synthetic peptide"
YTSRLHS

SEQ ID NO: 302 - protein, 9 aa, Artificial Sequence
  source: /note="Description of Artificial Sequence: Synthetic peptide"
QQGDYLPWT

SEQ ID NO: 303 - protein, 107 aa, Artificial Sequence
  source: /note="Description of Artificial Sequence: Synthetic polypeptide"
DIQMTQSPSSLSASVGDRVTITCRASQDITNYLNWYQQKPGKAVKLLIYYTSRLHSGVPSRFSGSGSGTDYTLTISSLQPEDFATYFCQQGDYLPWTFGQGTKLEIK

SEQ ID NO: 304 - protein, 214 aa, Artificial Sequence
  source: /note="Description of Artificial Sequence: Synthetic polypeptide"
DIQMTQSPSSLSASVGDRVTITCRASQDITNYLNWYQQKPGKAVKLLIYYTSRLHSGVPSRFSGSGSGTDYTLTISSLQPEDFATYFCQQGDYLPWTFGQGTKLEIKRTVAAPSVFIFPPSDEQLKSGTASVVCLLNNFYPREAKVQWKVDNALQSGNSQESVTEQDSKDSTYSLSSTLTLSKADYEKHKVYACEVTHQGLSSPVTKSFNRGEC

SEQ ID NO: 305 - protein, 5 aa, Artificial Sequence
  source: /note="Description of Artificial Sequence: Synthetic peptide"
SYWMH

SEQ ID NO: 306 - protein, 17 aa, Artificial Sequence
  source: /note="Description of Artificial Sequence: Synthetic peptide"
RIDPQSGGIKYAQKFQG

SEQ ID NO: 307 - protein, 9 aa, Artificial Sequence
  source: /note="Description of Artificial Sequence: Synthetic peptide"
WDYGGYFDV

SEQ ID NO: 308 - protein, 118 aa, Artificial Sequence; identical to SEQ ID NO: 98
  source: /note="Description of Artificial Sequence: Synthetic polypeptide"

SEQ ID NO: 309 - protein, 226 aa, Artificial Sequence; identical to SEQ ID NO: 99
  source: /note="Description of Artificial Sequence: Synthetic polypeptide"

SEQ ID NO: 310 - protein, 11 aa, Artificial Sequence
  source: /note="Description of Artificial Sequence: Synthetic peptide"
RASQDITNYLN

SEQ ID NO: 311 - protein, 7 aa, Artificial Sequence
  source: /note="Description of Artificial Sequence: Synthetic peptide"
YTSRLHS

SEQ ID NO: 312 - protein, 9 aa, Artificial Sequence
  source: /note="Description of Artificial Sequence: Synthetic peptide"
QQGDTYPWT

SEQ ID NO: 313 - protein, 107 aa, Artificial Sequence
  source: /note="Description of Artificial Sequence: Synthetic polypeptide"
DIQMTQSPSSLSASVGDRVTITCRASQDITNYLNWYQQKPGKAVKLLIYYTSRLHSGVPSRFSGSGSGTDYTLTISSLQPEDFATYFCQQGDTYPWTFGQGTKLEIK

SEQ ID NO: 314 - protein, 214 aa, Artificial Sequence
  source: /note="Description of Artificial Sequence: Synthetic polypeptide"
DIQMTQSPSSLSASVGDRVTITCRASQDITNYLNWYQQKPGKAVKLLIYYTSRLHSGVPSRFSGSGSGTDYTLTISSLQPEDFATYFCQQGDTYPWTFGQGTKLEIKRTVAAPSVFIFPPSDEQLKSGTASVVCLLNNFYPREAKVQWKVDNALQSGNSQESVTEQDSKDSTYSLSSTLTLSKADYEKHKVYACEVTHQGLSSPVTKSFNRGEC

SEQ ID NO: 315 - protein, 5 aa, Artificial Sequence
  source: /note="Description of Artificial Sequence: Synthetic peptide"
SYWMH

SEQ ID NO: 316 - protein, 17 aa, Artificial Sequence
  source: /note="Description of Artificial Sequence: Synthetic peptide"
RIDPQSGGIKYAQKFQG

SEQ ID NO: 317 - protein, 9 aa, Artificial Sequence
  source: /note="Description of Artificial Sequence: Synthetic peptide"
WDYGGYFDV

SEQ ID NO: 318 - protein, 118 aa, Artificial Sequence; identical to SEQ ID NO: 98
  source: /note="Description of Artificial Sequence: Synthetic polypeptide"

SEQ ID NO: 319 - protein, 226 aa, Artificial Sequence; identical to SEQ ID NO: 99
  source: /note="Description of Artificial Sequence: Synthetic polypeptide"

SEQ ID NO: 320 - protein, 11 aa, Artificial Sequence
  source: /note="Description of Artificial Sequence: Synthetic peptide"
RASQDITNYLN

SEQ ID NO: 321 - protein, 7 aa, Artificial Sequence
  source: /note="Description of Artificial Sequence: Synthetic peptide"
YTSRLHS

SEQ ID NO: 322 - protein, 9 aa, Artificial Sequence
  source: /note="Description of Artificial Sequence: Synthetic peptide"
QQGDTLYWT

SEQ ID NO: 323 - protein, 107 aa, Artificial Sequence
  source: /note="Description of Artificial Sequence: Synthetic polypeptide"
DIQMTQSPSSLSASVGDRVTITCRASQDITNYLNWYQQKPGKAVKLLIYYTSRLHSGVPSRFSGSGSGTDYTLTISSLQPEDFATYFCQQGDTLYWTFGQGTKLEIK

SEQ ID NO: 324 - protein, 214 aa, Artificial Sequence
  source: /note="Description of Artificial Sequence: Synthetic polypeptide"
DIQMTQSPSSLSASVGDRVTITCRASQDITNYLNWYQQKPGKAVKLLIYYTSRLHSGVPSRFSGSGSGTDYTLTISSLQPEDFATYFCQQGDTLYWTFGQGTKLEIKRTVAAPSVFIFPPSDEQLKSGTASVVCLLNNFYPREAKVQWKVDNALQSGNSQESVTEQDSKDSTYSLSSTLTLSKADYEKHKVYACEVTHQGLSSPVTKSFNRGEC

SEQ ID NO: 325 - protein, 5 aa, Artificial Sequence
  source: /note="Description of Artificial Sequence: Synthetic peptide"
SYWMH

SEQ ID NO: 326 - protein, 17 aa, Artificial Sequence
  source: /note="Description of Artificial Sequence: Synthetic peptide"
RIDPQSGGIKYAQKFQG

SEQ ID NO: 327 - protein, 9 aa, Artificial Sequence
  source: /note="Description of Artificial Sequence: Synthetic peptide"
WDYGGYFDV

SEQ ID NO: 328 - protein, 118 aa, Artificial Sequence
  source: /note="Description of Artificial Sequence: Synthetic polypeptide"
EVQLVQSGAEVKKPGASVKVSCKASGYYFTSYWMHWVRQAPGQGLEWMGRIDPQSGGIKYAQKFQGRATLTVDTSTSTAYMELSRLRSDDTAVYYCARWDYGGYFDVWGQGTLVTVSS

SEQ ID NO: 329 - protein, 226 aa, Artificial Sequence
  source: /note="Description of Artificial Sequence: Synthetic polypeptide"
EVQLVQSGAEVKKPGASVKVSCKASGYYFTSYWMHWVRQAPGQGLEWMGRIDPQSGGIKYAQKFQGRATLTVDTSTSTAYMELSRLRSDDTAVYYCARWDYGGYFDVWGQGTLVTVSSASTKGPSVFPLAPSSKSTSGGTAALGCLVKDYFPEPVTVSWNSGALTSGVHTFPAVLQSSGLYSLSSVVTVPSSSLGTQTYICNVNHKPSNTKVDKKVEPKSCDKTHT

SEQ ID NO: 330 - protein, 11 aa, Artificial Sequence
  source: /note="Description of Artificial Sequence: Synthetic peptide"
RASQDITNYLN

SEQ ID NO: 331 - protein, 7 aa, Artificial Sequence
  source: /note="Description of Artificial Sequence: Synthetic peptide"
YTSRLHS

SEQ ID NO: 332 - protein, 9 aa, Artificial Sequence
  source: /note="Description of Artificial Sequence: Synthetic peptide"
QQGDTLPWT

SEQ ID NO: 333 - protein, 107 aa, Artificial Sequence
  source: /note="Description of Artificial Sequence: Synthetic polypeptide"
DIQMTQSPSSLSASVGDRVTITCRASQDITNYLNWYQQKPGKAVKLLIYYTSRLHSGVPSRFSGSGSGTDYTLTISSLQPEDFATYFCQQGDTLPWTFGQGTKLEIK

SEQ ID NO: 334 - protein, 214 aa, Artificial Sequence
  source: /note="Description of Artificial Sequence: Synthetic polypeptide"
DIQMTQSPSSLSASVGDRVTITCRASQDITNYLNWYQQKPGKAVKLLIYYTSRLHSGVPSRFSGSGSGTDYTLTISSLQPEDFATYFCQQGDTLPWTFGQGTKLEIKRTVAAPSVFIFPPSDEQLKSGTASVVCLLNNFYPREAKVQWKVDNALQSGNSQESVTEQDSKDSTYSLSSTLTLSKADYEKHKVYACEVTHQGLSSPVTKSFNRGEC

SEQ ID NO: 335 - protein, 5 aa, Artificial Sequence
  source: /note="Description of Artificial Sequence: Synthetic peptide"
SYWMH

SEQ ID NO: 336 - protein, 17 aa, Artificial Sequence
  source: /note="Description of Artificial Sequence: Synthetic peptide"
RIDPQSGGIKYAQKFQG

SEQ ID NO: 337 - protein, 9 aa, Artificial Sequence
  source: /note="Description of Artificial Sequence: Synthetic peptide"
WDYGGYFDV

SEQ ID NO: 338 - protein, 118 aa, Artificial Sequence
  source: /note="Description of Artificial Sequence: Synthetic polypeptide"
EVQLVQSGAEVKKPGASVKVSCKASGYTYTSYWMHWVRQAPGQGLEWMGRIDPQSGGIKYAQKFQGRATLTVDTSTSTAYMELSRLRSDDTAVYYCARWDYGGYFDVWGQGTLVTVSS

SEQ ID NO: 339 - protein, 226 aa, Artificial Sequence
  source: /note="Description of Artificial Sequence: Synthetic polypeptide"
EVQLVQSGAEVKKPGASVKVSCKASGYTYTSYWMHWVRQAPGQGLEWMGRIDPQSGGIKYAQKFQGRATLTVDTSTSTAYMELSRLRSDDTAVYYCARWDYGGYFDVWGQGTLVTVSSASTKGPSVFPLAPSSKSTSGGTAALGCLVKDYFPEPVTVSWNSGALTSGVHTFPAVHQSSGLYSLSSVVTVPSSSLGTQTYICNVNHKPSNTKVDKKVEPKSCDKTHT

SEQ ID NO: 340 - protein, 11 aa, Artificial Sequence
  source: /note="Description of Artificial Sequence: Synthetic peptide"
RASQDITNYLN

SEQ ID NO: 341 - protein, 7 aa, Artificial Sequence
  source: /note="Description of Artificial Sequence: Synthetic peptide"
YTSRLHS

SEQ ID NO: 342 - protein, 9 aa, Artificial Sequence
  source: /note="Description of Artificial Sequence: Synthetic peptide"
QQGDTLPWT

SEQ ID NO: 343 - protein, 107 aa, Artificial Sequence; identical to SEQ ID NO: 333
  source: /note="Description of Artificial Sequence: Synthetic polypeptide"

SEQ ID NO: 344 - protein, 214 aa, Artificial Sequence; identical to SEQ ID NO: 334
  source: /note="Description of Artificial Sequence: Synthetic polypeptide"

SEQ ID NO: 345 - protein, 5 aa, Artificial Sequence
  source: /note="Description of Artificial Sequence: Synthetic peptide"
SYWMH

SEQ ID NO: 346 - protein, 17 aa, Artificial Sequence
  source: /note="Description of Artificial Sequence: Synthetic peptide"
RIDPQSGGIKYAQKFQG

SEQ ID NO: 347 - protein, 9 aa, Artificial Sequence
  source: /note="Description of Artificial Sequence: Synthetic peptide"
WDYGGYFDV

SEQ ID NO: 348 - protein, 118 aa, Artificial Sequence
  source: /note="Description of Artificial Sequence: Synthetic polypeptide"
EVQLVQSGAEVKKPGASVKVSCKASGYTFYSYWMHWVRQAPGQGLEWMGRIDPQSGGIKYAQKFQGRATLTVDTSTSTAYMELSRLRSDDTAVYYCARWDYGGYFDVWGQGTLVTVSS

SEQ ID NO: 349 - protein, 226 aa, Artificial Sequence
  source: /note="Description of Artificial Sequence: Synthetic polypeptide"
EVQLVQSGAEVKKPGASVKVSCKASGYTFYSYWMHWVRQAPGQGLEWMGRIDPQSGGIKYAQKFQGRATLTVDTSTSTAYMELSRLRSDDTAVYYCARWDYGGYFDVWGQGTLVTVSSASTKGPSVFPLAPSSKSTSGGTAALGCLVKDYFPEPVTVSWNSGALTSGVHTFPAVLQSSGLYSLSSVVTVPSSSLGTQTYICNVNHKPSNTKVDKKVEPKSCDKTHT

SEQ ID NO: 350 - protein, 11 aa, Artificial Sequence
  source: /note="Description of Artificial Sequence: Synthetic peptide"
RASQDITNYLN

SEQ ID NO: 351 - protein, 7 aa, Artificial Sequence
  source: /note="Description of Artificial Sequence: Synthetic peptide"
YTSRLHS

SEQ ID NO: 352 - protein, 9 aa, Artificial Sequence
  source: /note="Description of Artificial Sequence: Synthetic peptide"
QQGDTLPWT

SEQ ID NO: 353 - protein, 107 aa, Artificial Sequence; identical to SEQ ID NO: 333
  source: /note="Description of Artificial Sequence: Synthetic polypeptide"

SEQ ID NO: 354 - protein, 214 aa, Artificial Sequence; identical to SEQ ID NO: 334
  source: /note="Description of Artificial Sequence: Synthetic polypeptide"

SEQ ID NO: 355 - protein, 5 aa, Artificial Sequence
  source: /note="Description of Artificial Sequence: Synthetic peptide"
YYWMH

SEQ ID NO: 356 - protein, 17 aa, Artificial Sequence
  source: /note="Description of Artificial Sequence: Synthetic peptide"
RIDPQSGGIKYAQKFQG

SEQ ID NO: 357 - protein, 9 aa, Artificial Sequence
  source: /note="Description of Artificial Sequence: Synthetic peptide"
WDYGGYFDV

SEQ ID NO: 358 - protein, 118 aa, Artificial Sequence
  source: /note="Description of Artificial Sequence: Synthetic polypeptide"
EVQLVQSGAEVKKPGASVKVSCKASGYTFTYYWMHWVRQAPGQGLEWMGRIDPQSGGIKYAQKFQGRATLTVDTSTSTAYMELSRLRSDDTAVYYCARWDYGGYFDVWGQGTLVTVSS

SEQ ID NO: 359 - protein, 226 aa, Artificial Sequence
  source: /note="Description of Artificial Sequence: Synthetic polypeptide"
EVQLVQSGAEVKKPGASVKVSCKASGYTFTYYWMHWVRQAPGQGLEWMGRIDPQSGGIKYAQKFQGRATLTVDTSTSTAYMELSRLRSDDTAVYYCARWDYGGYFDVWGQGTLVTVSSASTKGPSVFPLAPSSKSTSGGTAALGCLVKDYFPEPVTVSWNSGALTSGVHTFPAVLQSSGLYSLSSVVTVPSSSLGTQTYICNVNHKPSNTKVDKKVEPKSCDKTHT

SEQ ID NO: 360 - protein, 11 aa, Artificial Sequence
  source: /note="Description of Artificial Sequence: Synthetic peptide"
RASQDITNYLN

SEQ ID NO: 361 - protein, 7 aa, Artificial Sequence
  source: /note="Description of Artificial Sequence: Synthetic peptide"
YTSRLHS

SEQ ID NO: 362 - protein, 9 aa, Artificial Sequence
  source: /note="Description of Artificial Sequence: Synthetic peptide"
QQGDTLPWT

SEQ ID NO: 363 - protein, 107 aa, Artificial Sequence; identical to SEQ ID NO: 333
  source: /note="Description of Artificial Sequence: Synthetic polypeptide"

SEQ ID NO: 364 - protein, 214 aa, Artificial Sequence; identical to SEQ ID NO: 334
  source: /note="Description of Artificial Sequence: Synthetic polypeptide"

SEQ ID NO: 365 - protein, 5 aa, Artificial Sequence
  source: /note="Description of Artificial Sequence: Synthetic peptide"
SYYMH

SEQ ID NO: 366 - protein, 17 aa, Artificial Sequence
  source: /note="Description of Artificial Sequence: Synthetic peptide"
RIDPQSGGIKYAQKFQG

SEQ ID NO: 367 - protein, 9 aa, Artificial Sequence
  source: /note="Description of Artificial Sequence: Synthetic peptide"
WDYGGYFDV

SEQ ID NO: 368 - protein, 118 aa, Artificial Sequence
  source: /note="Description of Artificial Sequence: Synthetic polypeptide"
EVQLVQSGAEVKKPGASVKVSCKASGYTFTSYYMHWVRQAPGQGLEWMGRIDPQSGGIKYAQKFQGRATLTVDTSTSTAYMELSRLRSDDTAVYYCARWDYGGYFDVWGQGTLVTVSS

SEQ ID NO: 369 - protein, 226 aa, Artificial Sequence
  source: /note="Description of Artificial Sequence: Synthetic polypeptide"
EVQLVQSGAEVKKPGASVKVSCKASGYTFTSYYMHWVRQAPGQGLEWMGRIDPQSGGIKYAQKFQGRATLTVDTSTSTAYMELSRLRSDDTAVYYCARWDYGGYFDVWGQGTLVTVSSASTKGPSVFPLAPSSKSTSGGTAALGCLVKDYFPEPVTVSWNSGALTSGVHTFPAVLQSSGLYSLSSVVTVPSSSLGTQTYICNVNHKPSNTKVDKKVEPKSCDKTHT

SEQ ID NO: 370 - protein, 11 aa, Artificial Sequence
  source: /note="Description of Artificial Sequence: Synthetic peptide"
RASQDITNYLN

SEQ ID NO: 371 - protein, 7 aa, Artificial Sequence
  source: /note="Description of Artificial Sequence: Synthetic peptide"
YTSRLHS

SEQ ID NO: 372 - protein, 9 aa, Artificial Sequence
  source: /note="Description of Artificial Sequence: Synthetic peptide"
QQGDTLPWT

SEQ ID NO: 373 - protein, 107 aa, Artificial Sequence; identical to SEQ ID NO: 333
  source: /note="Description of Artificial Sequence: Synthetic polypeptide"

SEQ ID NO: 374 - protein, 214 aa, Artificial Sequence; identical to SEQ ID NO: 334
  source: /note="Description of Artificial Sequence: Synthetic polypeptide"

SEQ ID NO: 375 - protein, 5 aa, Artificial Sequence
  source: /note="Description of Artificial Sequence: Synthetic peptide"
SYWYH

SEQ ID NO: 376 - protein, 17 aa, Artificial Sequence
  source: /note="Description of Artificial Sequence: Synthetic peptide"
RIDPQSGGIKYAQKFQG

SEQ ID NO: 377 - protein, 9 aa, Artificial Sequence
  source: /note="Description of Artificial Sequence: Synthetic peptide"
WDYGGYFDV

SEQ ID NO: 378 - protein, 118 aa, Artificial Sequence
  source: /note="Description of Artificial Sequence: Synthetic polypeptide"
EVQLVQSGAEVKKPGASVKVSCKASGYTFTSYWYHWVRQAPGQGLEWMGRIDPQSGGIKYAQKFQGRATLTVDTSTSTAYMELSRLRSDDTAVYYCARWDYGGYFDVWGQGTLVTVSS

SEQ ID NO: 379 - protein, 226 aa, Artificial Sequence
  source: /note="Description of Artificial Sequence: Synthetic polypeptide"
EVQLVQSGAEVKKPGASVKVSCKASGYTFTSYWYHWVRQAPGQGLEWMGRIDPQSGGIKYAQKFQGRATLTVDTSTSTAYMELSRLRSDDTAVYYCARWDYGGYFDVWGQGTLVTVSSASTKGPSVFPLAPSSKSTSGGTAALGCLVKDYFPEPVTVSWNSGALTSGVHTFPAVLQSSGLYSLSSVVTVPSSSLGTQTYICNVNHKPSNTKVDKKVEPKSCDKTHT

SEQ ID NO: 380 - protein, 11 aa, Artificial Sequence
  source: /note="Description of Artificial Sequence: Synthetic peptide"
RASQDITNYLN

SEQ ID NO: 381 - protein, 7 aa, Artificial Sequence
  source: /note="Description of Artificial Sequence: Synthetic peptide"
YTSRLHS

SEQ ID NO: 382 - protein, 9 aa, Artificial Sequence
  source: /note="Description of Artificial Sequence: Synthetic peptide"
QQGDTLPWT

SEQ ID NO: 383 - protein, 107 aa, Artificial Sequence; identical to SEQ ID NO: 333
  source: /note="Description of Artificial Sequence: Synthetic polypeptide"

SEQ ID NO: 384 - protein, 214 aa, Artificial Sequence; identical to SEQ ID NO: 334
  source: /note="Description of Artificial Sequence: Synthetic polypeptide"

SEQ ID NO: 385 - protein, 5 aa, Artificial Sequence
  source: /note="Description of Artificial Sequence: Synthetic peptide"
SYWMY

SEQ ID NO: 386 - protein, 17 aa, Artificial Sequence
  source: /note="Description of Artificial Sequence: Synthetic peptide"
RIDPQSGGIKYAQKFQG

SEQ ID NO: 387 - protein, 9 aa, Artificial Sequence
  source: /note="Description of Artificial Sequence: Synthetic peptide"
WDYGGYFDV

SEQ ID NO: 388 - protein, 118 aa, Artificial Sequence
  source: /note="Description of Artificial Sequence: Synthetic polypeptide"
EVQLVQSGAEVKKPGASVKVSCKASGYTFTSYWMYWVRQAPGQGLEWMGRIDPQSGGIKYAQKFQGRATLTVDTSTSTAYMELSRLRSDDTAVYYCARWDYGGYFDVWGQGTLVTVSS

SEQ ID NO: 389 - protein, 226 aa, Artificial Sequence
  source: /note="Description of Artificial Sequence: Synthetic polypeptide"
EVQLVQSGAEVKKPGASVKVSCKASGYTFTSYWMYWVRQAPGQGLEWMGRIDPQSGGIKYAQKFQGRATLTVDTSTSTAYMELSRLRSDDTAVYYCARWDYGGYFDVWGQGTLVTVSSASTKGPSVFPLAPSSKSTSGGTAALGCLVKDYFPEPVTVSWNSGALTSGVHTFPAVLQSSGLYSLSSVVTVPSSSLGTQTYICNVNHKPSNTKVDKKVEPKSCDKTHT

SEQ ID NO: 390 - protein, 11 aa, Artificial Sequence
  source: /note="Description of Artificial Sequence: Synthetic peptide"
RASQDITNYLN

SEQ ID NO: 391 - protein, 7 aa, Artificial Sequence
  source: /note="Description of Artificial Sequence: Synthetic peptide"
YTSRLHS

SEQ ID NO: 392 - protein, 9 aa, Artificial Sequence
  source: /note="Description of Artificial Sequence: Synthetic peptide"
QQGDTLPWT

SEQ ID NO: 393 - protein, 107 aa, Artificial Sequence; identical to SEQ ID NO: 333
  source: /note="Description of Artificial Sequence: Synthetic polypeptide"

SEQ ID NO: 394 - protein, 214 aa, Artificial Sequence; identical to SEQ ID NO: 334
  source: /note="Description of Artificial Sequence: Synthetic polypeptide"

SEQ ID NO: 395 - protein, 5 aa, Artificial Sequence
  source: /note="Description of Artificial Sequence: Synthetic peptide"
SYWYH

SEQ ID NO: 396 - protein, 17 aa, Artificial Sequence
  source: /note="Description of Artificial Sequence: Synthetic peptide"
YIDPQSGGIKYAQKFQG

SEQ ID NO: 397 - protein, 9 aa, Artificial Sequence
  source: /note="Description of Artificial Sequence: Synthetic peptide"
WDYGGYFDV

SEQ ID NO: 398 - protein, 118 aa, Artificial Sequence
  source: /note="Description of Artificial Sequence: Synthetic polypeptide"
EVQLVQSGAEVKKPGASVKVSCKASGYTFTSYWMHWVRQAPGQGLEWMGYIDPQSGGIKYAQKFQGRATLTVDTSTSTAYMELSRLRSDDTAVYYCARWDYGGYFDVWGQGTLVTVSS

SEQ ID NO: 399 - protein, 226 aa, Artificial Sequence
  source: /note="Description of Artificial Sequence: Synthetic polypeptide"
EVQLVQSGAEVKKPGASVKVSCKASGYTFTSYWMHWVRQAPGQGLEWMGYIDPQSGGIKYAQKFQGRATLTVDTSTSTAYMELSRLRSDDTAVYYCARWDYGGYFDVWGQGTLVTVSSASTKGPSVFPLAPSSKSTSGGTAALGCLVKDYFPEPVTVSWNSGALTSGVHTFPAVLQSSGLYSLSSVVTVPSSSLGTQTYICNVNHKPSNTKVDKKVEPKSCDKTHT

SEQ ID NO: 400 - protein, 11 aa, Artificial Sequence
  source: /note="Description of Artificial Sequence: Synthetic peptide"
RASQDITNYLN

SEQ ID NO: 401 - protein, 7 aa, Artificial Sequence
  source: /note="Description of Artificial Sequence: Synthetic peptide"
YTSRLHS

SEQ ID NO: 402 - protein, 9 aa, Artificial Sequence
  source: /note="Description of Artificial Sequence: Synthetic peptide"
QQGDTLPWT

SEQ ID NO: 403 - protein, 107 aa, Artificial Sequence; identical to SEQ ID NO: 333
  source: /note="Description of Artificial Sequence: Synthetic polypeptide"

SEQ ID NO: 404 - protein, 214 aa, Artificial Sequence; identical to SEQ ID NO: 334
  source: /note="Description of Artificial Sequence: Synthetic polypeptide"

SEQ ID NO: 405 - protein, 5 aa, Artificial Sequence
  source: /note="Description of Artificial Sequence: Synthetic peptide"
SYWYH

SEQ ID NO: 406 - protein, 17 aa, Artificial Sequence
  source: /note="Description of Artificial Sequence: Synthetic peptide"
RYDPQSGGIKYAQKFQG

SEQ ID NO: 407 - protein, 9 aa, Artificial Sequence
  source: /note="Description of Artificial Sequence: Synthetic peptide"
WDYGGYFDV

SEQ ID NO: 408 - protein, 118 aa, Artificial Sequence
  source: /note="Description of Artificial Sequence: Synthetic polypeptide"
EVQLVQSGAEVKKPGASVKVSCKASGYTFTSYWMHWVRQAPGQGLEWMGRYDPQSGGIKYAQKFQGRATLTVDTSTSTAYMELSRLRSDDTAVYYCARWDYGGYFDVWGQGTLVTVSS

SEQ ID NO: 409 - protein, 226 aa, Artificial Sequence
  source: /note="Description of Artificial Sequence: Synthetic polypeptide"
EVQLVQSGAEVKKPGASVKVSCKASGYTFTSYWMHWVRQAPGQGLEWMGRYDPQSGGIKYAQKFQGRATLTVDTSTSTAYMELSRLRSDDTAVYYCARWDYGGYFDVWGQGTLVTVSSASTKGPSVFPLAPSSKSTSGGTAALGCLVKDYFPEPVTVSWNSGALTSGVHTFPAVLQSSGLYSLSSVVTVPSSSLGTQTYICNVNHKPSNTKVDKKVEPKSCDKTHT

SEQ ID NO: 410 - protein, 11 aa, Artificial Sequence
  source: /note="Description of Artificial Sequence: Synthetic peptide"
RASQDITNYLN

SEQ ID NO: 411 - protein, 7 aa, Artificial Sequence
  source: /note="Description of Artificial Sequence: Synthetic peptide"
YTSRLHS

SEQ ID NO: 412 - protein, 9 aa, Artificial Sequence
  source: /note="Description of Artificial Sequence: Synthetic peptide"
QQGDTLPWT

SEQ ID NO: 413 - protein, 107 aa, Artificial Sequence; identical to SEQ ID NO: 333
  source: /note="Description of Artificial Sequence: Synthetic polypeptide"

SEQ ID NO: 414 - protein, 214 aa, Artificial Sequence; identical to SEQ ID NO: 334
  source: /note="Description of Artificial Sequence: Synthetic polypeptide"

SEQ ID NO: 415 - protein, 5 aa, Artificial Sequence
  source: /note="Description of Artificial Sequence: Synthetic peptide"
SYWYH

SEQ ID NO: 416 - protein, 17 aa, Artificial Sequence
  source: /note="Description of Artificial Sequence: Synthetic peptide"
RIYPQSGGIKYAQKFQG

SEQ ID NO: 417 - protein, 9 aa, Artificial Sequence
  source: /note="Description of Artificial Sequence: Synthetic peptide"
WDYGGYFDV

SEQ ID NO: 418 - protein, 118 aa, Artificial Sequence
  source: /note="Description of Artificial Sequence: Synthetic polypeptide"
EVQLVQSGAEVKKPGASVKVSCKASGYTFTSYWMHWVRQAPGQGLEWMGRIYPQSGGIKYAQKFQGRATLTVDTSTSTAYMELSRLRSDDTAVYYCARWDYGGYFDVWGQGTLVTVSS

SEQ ID NO: 419 - protein, 226 aa, Artificial Sequence
  source: /note="Description of Artificial Sequence: Synthetic polypeptide"
EVQLVQSGAEVKKPGASVKVSCKASGYTFTSYWMHWVRQAPGQGLEWMGRIYPQSGGIKYAQKFQGRATLTVDTSTSTAYMELSRLRSDDTAVYYCARWDYGGYFDVWGQGTLVTVSSASTKGPSVFPLAPSSKSTSGGTAALGCLVKDYFPEPVTVSWNSGALTSGVHTFPAVLQSSGLYSLSSVVTVPSSSLGTQTYICNVNHKPSNTKVDKKVEPKSCDKTHT

SEQ ID NO: 420 - protein, 11 aa, Artificial Sequence
  source: /note="Description of Artificial Sequence: Synthetic peptide"
RASQDITNYLN

SEQ ID NO: 421 - protein, 7 aa, Artificial Sequence
  source: /note="Description of Artificial Sequence: Synthetic peptide"
YTSRLHS

SEQ ID NO: 422 - protein, 9 aa, Artificial Sequence
  source: /note="Description of Artificial Sequence: Synthetic peptide"
QQGDTLPWT

SEQ ID NO: 423 - protein, 107 aa, Artificial Sequence; identical to SEQ ID NO: 333
  source: /note="Description of Artificial Sequence: Synthetic polypeptide"

SEQ ID NO: 424 - protein, 214 aa, Artificial Sequence; identical to SEQ ID NO: 334
  source: /note="Description of Artificial Sequence: Synthetic polypeptide"

SEQ ID NO: 425 - protein, 5 aa, Artificial Sequence
  source: /note="Description of Artificial Sequence: Synthetic peptide"
SYWYH

SEQ ID NO: 426 - protein, 17 aa, Artificial Sequence
  source: /note="Description of Artificial Sequence: Synthetic peptide"
RIDYQSGGIKYAQKFQG

SEQ ID NO: 427 - protein, 9 aa, Artificial Sequence
  source: /note="Description of Artificial Sequence: Synthetic peptide"
WDYGGYFDV

SEQ ID NO: 428 - protein, 118 aa, Artificial Sequence
  source: /note="Description of Artificial Sequence: Synthetic polypeptide"
EVQLVQSGAEVKKPGASVKVSCKASGYTFTSYWMHWVRQAPGQGLEWMGRIDYQSGGIKYAQKFQGRATLTVDTSTSTAYMELSRLRSDDTAVYYCARWDYGGYFDVWGQGTLVTVSS

SEQ ID NO: 429 - protein, 226 aa, Artificial Sequence
  source: /note="Description of Artificial Sequence: Synthetic polypeptide"
EVQLVQSGAEVKKPGASVKVSCKASGYTFTSYWMHWVRQAPGQGLEWMGRIDYQSGGIKYAQKFQGRATLTVDTSTSTAYMELSRLRSDDTAVYYCARWDYGGYFDVWGQGTLVTVSSASTKGPSVFPLAPSSKSTSGGTAALGCLVKDYFPEPVTVSWNSGALTSGVHTFPAVLQSSGLYSLSSVVTVPSSSLGTQTYICNVNHKPSNTKVDKKVEPKSCDKTHT

SEQ ID NO: 430 - protein, 11 aa, Artificial Sequence
  source: /note="Description of Artificial Sequence: Synthetic peptide"
RASQDITNYLN

SEQ ID NO: 431 - protein, 7 aa, Artificial Sequence
  source: /note="Description of Artificial Sequence: Synthetic peptide"
YTSRLHS

SEQ ID NO: 432 - protein, 9 aa, Artificial Sequence
  source: /note="Description of Artificial Sequence: Synthetic peptide"
QQGDTLPWT

SEQ ID NO: 433 - protein, 107 aa, Artificial Sequence; identical to SEQ ID NO: 333
  source: /note="Description of Artificial Sequence: Synthetic polypeptide"

SEQ ID NO: 434 - protein, 214 aa, Artificial Sequence; identical to SEQ ID NO: 334
  source: /note="Description of Artificial Sequence: Synthetic polypeptide"

SEQ ID NO: 435 - protein, 5 aa, Artificial Sequence
  source: /note="Description of Artificial Sequence: Synthetic peptide"
SYWYH

SEQ ID NO: 436 - protein, 17 aa, Artificial Sequence
  source: /note="Description of Artificial Sequence: Synthetic peptide"
RIDPYSGGIKYAQKFQG

SEQ ID NO: 437 - protein, 9 aa, Artificial Sequence
  source: /note="Description of Artificial Sequence: Synthetic peptide"
WDYGGYFDV

SEQ ID NO: 438 - protein, 118 aa, Artificial Sequence
  source: /note="Description of Artificial Sequence: Synthetic polypeptide"
EVQLVQSGAEVKKPGASVKVSCKASGYTFTSYWMHWVRQAPGQGLEWMGRIDPYSGGIKYAQKFQGRATLTVDTSTSTAYMELSRLRSDDTAVYYCARWDYGGYFDVWGQGTLVTVSS

SEQ ID NO: 439 - protein, 226 aa, Artificial Sequence
  source: /note="Description of Artificial Sequence: Synthetic polypeptide"
EVQLVQSGAEVKKPGASVKVSCKASGYTFTSYWMHWVRQAPGQGLEWMGRIDPYSGGIKYAQKFQGRATLTVDTSTSTAYMELSRLRSDDTAVYYCARWDYGGYFDVWGQGTLVTVSSASTKGPSVFPLAPSSKSTSGGTAALGCLVKDYFPEPVTVSWNSGALTSGVHTFPAVLQSSGLYSLSSVVTVPSSSLGTQTYICNVNHKPSNTKVDKKVEPKSCDKTHT

SEQ ID NO: 440 - protein, 11 aa, Artificial Sequence
  source: /note="Description of Artificial Sequence: Synthetic peptide"
RASQDITNYLN

SEQ ID NO: 441 - protein, 7 aa, Artificial Sequence
  source: /note="Description of Artificial Sequence: Synthetic peptide"
YTSRLHS

SEQ ID NO: 442 - protein, 9 aa, Artificial Sequence
  source: /note="Description of Artificial Sequence: Synthetic peptide"
QQGDTLPWT

SEQ ID NO: 443 - protein, 107 aa, Artificial Sequence; identical to SEQ ID NO: 333
  source: /note="Description of Artificial Sequence: Synthetic polypeptide"

SEQ ID NO: 444 - protein, 214 aa, Artificial Sequence; identical to SEQ ID NO: 334
  source: /note="Description of Artificial Sequence: Synthetic polypeptide"

SEQ ID NO: 445 - protein, 5 aa, Artificial Sequence
  source: /note="Description of Artificial Sequence: Synthetic peptide"
SYWMH

SEQ ID NO: 446 - protein, 17 aa, Artificial Sequence
  source: /note="Description of Artificial Sequence: Synthetic peptide"
RIDPQSGGIKYAQKFQG

SEQ ID NO: 447 - protein, 9 aa, Artificial Sequence
  source: /note="Description of Artificial Sequence: Synthetic peptide"
WDYGGYFDV

SEQ ID NO: 448 - protein, 118 aa, Artificial Sequence; identical to SEQ ID NO: 98
  source: /note="Description of Artificial Sequence: Synthetic polypeptide"

SEQ ID NO: 449 - protein, 226 aa, Artificial Sequence; identical to SEQ ID NO: 99
  source: /note="Description of Artificial Sequence: Synthetic polypeptide"

SEQ ID NO: 450 - protein, 11 aa, Artificial Sequence
  source: /note="Description of Artificial Sequence: Synthetic peptide"
RASQDITNYLN

SEQ ID NO: 451 - protein, 7 aa, Artificial Sequence
  source: /note="Description of Artificial Sequence: Synthetic peptide"
YTSRLHS

SEQ ID NO: 452 - protein, 9 aa, Artificial Sequence
  source: /note="Description of Artificial Sequence: Synthetic peptide"
QQGDTLPWT

SEQ ID NO: 453 - protein, 107 aa, Artificial Sequence; identical to SEQ ID NO: 333
  source: /note="Description of Artificial Sequence: Synthetic polypeptide"

SEQ ID NO: 454 - protein, 214 aa, Artificial Sequence; identical to SEQ ID NO: 334
  source: /note="Description of Artificial Sequence: Synthetic polypeptide"

SEQ ID NO: 455 - protein, 5 aa, Artificial Sequence
  source: /note="Description of Artificial Sequence: Synthetic peptide"
SYWYH

SEQ ID NO: 456 - protein, 17 aa, Artificial Sequence
  source: /note="Description of Artificial Sequence: Synthetic peptide"
RIDPQYGGIKYAQKFQG

SEQ ID NO: 457 - protein, 9 aa, Artificial Sequence
  source: /note="Description of Artificial Sequence: Synthetic peptide"
WDYGGYFDV

SEQ ID NO: 458 - protein, 118 aa, Artificial Sequence
  source: /note="Description of Artificial Sequence: Synthetic polypeptide"
EVQLVQSGAEVKKPGASVKVSCKASGYTFTSYWMHWVRQAPGQGLEWMGRIDPQYGGIKYAQKFQGRATLTVDTSTSTAYMELSRLRSDDTAVYYCARWDYGGYFDVWGQGTLVTVSS

SEQ ID NO: 459 - protein, 226 aa, Artificial Sequence
  source: /note="Description of Artificial Sequence: Synthetic polypeptide"
EVQLVQSGAEVKKPGASVKVSCKASGYTFTSYWMHWVRQAPGQGLEWMGRIDPQYGGIKYAQKFQGRATLTVDTSTSTAYMELSRLRSDDTAVYYCARWDYGGYFDVWGQGTLVTVSSASTKGPSVFPLAPSSKSTSGGTAALGCLVKDYFPEPVTVSWNSGALTSGVHTFPAVLQSSGLYSLSSVVTVPSSSLGTQTYICNVNHKPSNTKVDKKVEPKSCDKTHT

SEQ ID NO: 460 - protein, 11 aa, Artificial Sequence
  source: /note="Description of Artificial Sequence: Synthetic peptide"
RASQDITNYLN

SEQ ID NO: 461 - protein, 7 aa, Artificial Sequence
  source: /note="Description of Artificial Sequence: Synthetic peptide"
YTSRLHS

SEQ ID NO: 462 - protein, 9 aa, Artificial Sequence
  source: /note="Description of Artificial Sequence: Synthetic peptide"
QQGDTLPWT

SEQ ID NO: 463 - protein, 107 aa, Artificial Sequence; identical to SEQ ID NO: 333
  source: /note="Description of Artificial Sequence: Synthetic polypeptide"

SEQ ID NO: 464 - protein, 214 aa, Artificial Sequence; identical to SEQ ID NO: 334
  source: /note="Description of Artificial Sequence: Synthetic polypeptide"

SEQ ID NO: 465 - protein, 5 aa, Artificial Sequence
  source: /note="Description of Artificial Sequence: Synthetic peptide"
SYWYH

SEQ ID NO: 466 - protein, 17 aa, Artificial Sequence
  source: /note="Description of Artificial Sequence: Synthetic peptide"
RIDPQSYGIKYAQKFQG

SEQ ID NO: 467 - protein, 9 aa, Artificial Sequence
  source: /note="Description of Artificial Sequence: Synthetic peptide"
WDYGGYFDV

SEQ ID NO: 468 - protein, 118 aa, Artificial Sequence
  source: /note="Description of Artificial Sequence: Synthetic polypeptide"
EVQLVQSGAEVKKPGASVKVSCKASGYTFTSYWMHWVRQAPGQGLEWMGRIDPQSYGIKYAQKFQGRATLTVDTSTSTAYMELSRLRSDDTAVYYCARWDYGGYFDVWGQGTLVTVSS

SEQ ID NO: 469 - protein, 226 aa, Artificial Sequence
  source: /note="Description of Artificial Sequence: Synthetic polypeptide"
EVQLVQSGAEVKKPGASVKVSCKASGYTFTSYWMHWVRQAPGQGLEWMGRIDPQSYGIKYAQKFQGRATLTVDTSTSTAYMELSRLRSDDTAVYYCARWDYGGYFDVWGQGTLVTVSSASTKGPSVFPLAPSSKSTSGGTAALGCLVKDYFPEPVTVSWNSGALTSGVHTFPAVLQSSGLYSLSSVVTVPSSSLGTQTYICNVNHKPSNTKVDKKVEPKSCDKTHT

SEQ ID NO: 470 - protein, 11 aa, Artificial Sequence
  source: /note="Description of Artificial Sequence: Synthetic peptide"
RASQDITNYLN

SEQ ID NO: 471 - protein, 7 aa, Artificial Sequence
  source: /note="Description of Artificial Sequence: Synthetic peptide"
YTSRLHS

SEQ ID NO: 472 - protein, 9 aa, Artificial Sequence
  source: /note="Description of Artificial Sequence: Synthetic peptide"
QQGDTLPWT

SEQ ID NO: 473 - protein, 107 aa, Artificial Sequence; identical to SEQ ID NO: 333
  source: /note="Description of Artificial Sequence: Synthetic polypeptide"

SEQ ID NO: 474 - protein, 214 aa, Artificial Sequence; identical to SEQ ID NO: 334
  source: /note="Description of Artificial Sequence: Synthetic polypeptide"

SEQ ID NO: 475 - protein, 5 aa, Artificial Sequence
  source: /note="Description of Artificial Sequence: Synthetic peptide"
SYWYH

SEQ ID NO: 476 - protein, 17 aa, Artificial Sequence
  source: /note="Description of Artificial Sequence: Synthetic peptide"
RIDPQSGYIKYAQKFQG

SEQ ID NO: 477 - protein, 9 aa, Artificial Sequence
  source: /note="Description of Artificial Sequence: Synthetic peptide"
WDYGGYFDV

SEQ ID NO: 478 - protein, 118 aa, Artificial Sequence
  source: /note="Description of Artificial Sequence: Synthetic polypeptide"
EVQLVQSGAEVKKPGASVKVSCKASGYTFTSYWMHWVRQAPGQGLEWMGRIDPQSGYIKYAQKFQGRATLTVDTSTSTAYMELSRLRSDDTAVYYCARWDYGGYFDVWGQGTLVTVSS

SEQ ID NO: 479 - protein, 226 aa, Artificial Sequence
  source: /note="Description of Artificial Sequence: Synthetic polypeptide"
EVQLVQSGAEVKKPGASVKVSCKASGYTFTSYWMHWVRQAPGQGLEWMGRIDPQSGYIKYAQKFQGRATLTVDTSTSTAYMELSRLRSDDTAVYYCARWDYGGYFDVWGQGTLVTVSSASTKGPSVFPLAPSSKSTSGGTAALGCLVKDYFPEPVTVSWNSGALTSGVHTFPAVLQSSGLYSLSSVVTVPSSSLGTQTYICNVNHKPSNTKVDKKVEPKSCDKTHT

SEQ ID NO: 480 - protein, 11 aa, Artificial Sequence
  source: /note="Description of Artificial Sequence: Synthetic peptide"
RASQDITNYLN

SEQ ID NO: 481 - protein, 7 aa, Artificial Sequence
  source: /note="Description of Artificial Sequence: Synthetic peptide"
YTSRLHS

SEQ ID NO: 482 - protein, 9 aa, Artificial Sequence
  source: /note="Description of Artificial Sequence: Synthetic peptide"
QQGDTLPWT

SEQ ID NO: 483 - protein, 107 aa, Artificial Sequence; identical to SEQ ID NO: 333
  source: /note="Description of Artificial Sequence: Synthetic polypeptide"

SEQ ID NO: 484 - protein, 214 aa, Artificial Sequence; identical to SEQ ID NO: 334
  source: /note="Description of Artificial Sequence: Synthetic polypeptide"

SEQ ID NO: 485 - protein, 5 aa, Artificial Sequence
  source: /note="Description of Artificial Sequence: Synthetic peptide"
SYWYH

SEQ ID NO: 486 - protein, 17 aa, Artificial Sequence
  source: /note="Description of Artificial Sequence: Synthetic peptide"
RIDPQSGGYKYAQKFQG

SEQ ID NO: 487 - protein, 9 aa, Artificial Sequence
  source: /note="Description of Artificial Sequence: Synthetic peptide"
WDYGGYFDV

SEQ ID NO: 488 - protein, 118 aa, Artificial Sequence
  source: /note="Description of Artificial Sequence: Synthetic polypeptide"
EVQLVQSGAEVKKPGASVKVSCKASGYTFTSYWMHWVRQAPGQGLEWMGRIDPQSGGYKYAQKFQGRATLTVDTSTSTAYMELSRLRSDDTAVYYCARWDYGGYFDVWGQGTLVTVSS

SEQ ID NO: 489 - protein, 226 aa, Artificial Sequence
  source: /note="Description of Artificial Sequence: Synthetic polypeptide"
EVQLVQSGAEVKKPGASVKVSCKASGYTFTSYWMHWVRQAPGQGLEWMGRIDPQSGGYKYAQKFQGRATLTVDTSTSTAYMELSRLRSDDTAVYYCARWDYGGYFDVWGQGTLVTVSSASTKGPSVFPLAPSSKSTSGGTAALGCLVKDYFPEPVTVSWNSGALTSGVHTFPAVLQSSGLYSLSSVVTVPSSSLGTQTYICNVNHKPSNTKVDKKVEPKSCDKTHT

SEQ ID NO: 490 - protein, 11 aa, Artificial Sequence
  source: /note="Description of Artificial Sequence: Synthetic peptide"
RASQDITNYLN

SEQ ID NO: 491 - protein, 7 aa, Artificial Sequence
  source: /note="Description of Artificial Sequence: Synthetic peptide"
YTSRLHS

SEQ ID NO: 492 - protein, 9 aa, Artificial Sequence
  source: /note="Description of Artificial Sequence: Synthetic peptide"
QQGDTLPWT

SEQ ID NO: 493 - protein, 107 aa, Artificial Sequence; identical to SEQ ID NO: 333
  source: /note="Description of Artificial Sequence: Synthetic polypeptide"

SEQ ID NO: 494 - protein, 214 aa, Artificial Sequence; identical to SEQ ID NO: 334
  source: /note="Description of Artificial Sequence: Synthetic polypeptide"

SEQ ID NO: 495 - protein, 5 aa, Artificial Sequence
  source: /note="Description of Artificial Sequence: Synthetic peptide"
SYWYH

SEQ ID NO: 496 - protein, 17 aa, Artificial Sequence
  source: /note="Description of Artificial Sequence: Synthetic peptide"
RIDPQSGGIYYAQKFQG

SEQ ID NO: 497 - protein, 9 aa, Artificial Sequence
  source: /note="Description of Artificial Sequence: Synthetic peptide"
WDYGGYFDV

SEQ ID NO: 498 - protein, 118 aa, Artificial Sequence
  source: /note="Description of Artificial Sequence: Synthetic polypeptide"
EVQLVQSGAEVKKPGASVKVSCKASGYTFTSYWMHWVRQAPGQGLEWMGRIDPQSGGIYYAQKFQGRATLTVDTSTSTAYMELSRLRSDDTAVYYCARWDYGGYFDVWGQGTLVTVSS

SEQ ID NO: 499 - protein, 226 aa, Artificial Sequence
  source: /note="Description of Artificial Sequence: Synthetic polypeptide"
EVQLVQSGAEVKKPGASVKVSCKASGYTFTSYWMHWVRQAPGQGLEWMGRIDPQSGGIYYAQKFQGRATLTVDTSTSTAYMELSRLRSDDTAVYYCARWDYGGYFDVWGQGTLVTVSSASTKGPSVFPLAPSSKSTSGGTAALGCLVKDYFPEPVTVSWNSGALTSGVHTFPAVLQSSGLYSLSSVVTVPSSSLGTQTYICNVNHKPSNTKVDKKVEPKSCDKTHT

SEQ ID NO: 500 - protein, 11 aa, Artificial Sequence
  source: /note="Description of Artificial Sequence: Synthetic peptide"
RASQDITNYLN

SEQ ID NO: 501 - protein, 7 aa, Artificial Sequence
  source: /note="Description of Artificial Sequence: Synthetic peptide"
YTSRLHS

SEQ ID NO: 502 - protein, 9 aa, Artificial Sequence
  source: /note="Description of Artificial Sequence: Synthetic peptide"
QQGDTLPWT

SEQ ID NO: 503 - protein, 107 aa, Artificial Sequence; identical to SEQ ID NO: 333
  source: /note="Description of Artificial Sequence: Synthetic polypeptide"

SEQ ID NO: 504 - protein, 214 aa, Artificial Sequence; identical to SEQ ID NO: 334
  source: /note="Description of Artificial Sequence: Synthetic polypeptide"

SEQ ID NO: 505 - protein, 5 aa, Artificial Sequence
  source: /note="Description of Artificial Sequence: Synthetic peptide"
SYWYH

SEQ ID NO: 506 - protein, 17 aa, Artificial Sequence
  source: /note="Description of Artificial Sequence: Synthetic peptide"
RIDPQSGGIKYAQKFQG

SEQ ID NO: 507 - protein, 9 aa, Artificial Sequence
  source: /note="Description of Artificial Sequence: Synthetic peptide"
YDYGGYFDV

SEQ ID NO: 508 - protein, 118 aa, Artificial Sequence
  source: /note="Description of Artificial Sequence: Synthetic polypeptide"
EVQLVQSGAEVKKPGASVKVSCKASGYTFTSYWMHWVRQAPGQGLEWMGRIDPQSGGIKYAQKFQGRATLTVDTSTSTAYMELSRLRSDDTAVYYCARYDYGGYFDVWGQGTLVTVSS

SEQ ID NO: 509 - protein, 226 aa, Artificial Sequence
  source: /note="Description of Artificial Sequence: Synthetic polypeptide"
EVQLVQSGAEVKKPGASVKVSCKASGYTFTSYWMHWVRQAPGQGLEWMGRIDPQSGGIKYAQKFQGRATLTVDTSTSTAYMELSRLRSDDTAVYYCARYDYGGYFDVWGQGTLVTVSSASTKGPSVFPLAPSSKSTSGGTAALGCLVKDYFPEPVTVSWNSGALTSGVHTFPAVLQSSGLYSLSSVVTVPSSSLGTQTYICNVNHKPSNTKVDKKVEPKSCDKTHT

SEQ ID NO: 510 - protein, 11 aa, Artificial Sequence
  source: /note="Description of Artificial Sequence: Synthetic peptide"
RASQDITNYLN

SEQ ID NO: 511 - protein, 7 aa, Artificial Sequence
  source: /note="Description of Artificial Sequence: Synthetic peptide"
YTSRLHS

SEQ ID NO: 512 - protein, 9 aa, Artificial Sequence
  source: /note="Description of Artificial Sequence: Synthetic peptide"
QQGDTLPWT

SEQ ID NO: 513 - protein, 107 aa, Artificial Sequence; identical to SEQ ID NO: 333
  source: /note="Description of Artificial Sequence: Synthetic polypeptide"

SEQ ID NO: 514 - protein, 214 aa, Artificial Sequence; identical to SEQ ID NO: 334
  source: /note="Description of Artificial Sequence: Synthetic polypeptide"

SEQ ID NO: 515 - protein, 5 aa, Artificial Sequence
  source: /note="Description of Artificial Sequence: Synthetic peptide"
SYWYH

SEQ ID NO: 516 - protein, 17 aa, Artificial Sequence
  source: /note="Description of Artificial Sequence: Synthetic peptide"
RIDPQSGGIKYAQKFQG

SEQ ID NO: 517 - protein, 9 aa, Artificial Sequence
  source: /note="Description of Artificial Sequence: Synthetic peptide"
WYYGGYFDV

SEQ ID NO: 518 - protein, 118 aa, Artificial Sequence
  source: /note="Description of Artificial Sequence: Synthetic polypeptide"
EVQLVQSGAEVKKPGASVKVSCKASGYTFTSYWMHWVRQAPGQGLEWMGRIDPQSGGIKYAQKFQGRATLTVDTSTSTAYMELSRLRSDDTAVYYCARWYYGGYFDVWGQGTLVTVSS

SEQ ID NO: 519 - protein, 226 aa, Artificial Sequence
  source: /note="Description of Artificial Sequence: Synthetic polypeptide"
EVQLVQSGAEVKKPGASVKVSCKASGYTFTSYWMHWVRQAPGQGLEWMGRIDPQSGGIKYAQKFQGRATLTVDTSTSTAYMELSRLRSDDTAVYYCARWYYGGYFDVWGQGTLVTVSSASTKGPSVFPLAPSSKSTSGGTAALGCLVKDYFPEPVTVSWNSGALTSGVHTFPAVLQSSGLYSLSSVVTVPSSSLGTQTYICNVNHKPSNTKVDKKVEPKSCDKTHT

SEQ ID NO: 520 - protein, 11 aa, Artificial Sequence
  source: /note="Description of Artificial Sequence: Synthetic peptide"
RASQDITNYLN

SEQ ID NO: 521 - protein, 7 aa, Artificial Sequence
  source: /note="Description of Artificial Sequence: Synthetic peptide"
YTSRLHS

SEQ ID NO: 522 - protein, 9 aa, Artificial Sequence
  source: /note="Description of Artificial Sequence: Synthetic peptide"
QQGDTLPWT

SEQ ID NO: 523 - protein, 107 aa, Artificial Sequence; identical to SEQ ID NO: 333
  source: /note="Description of Artificial Sequence: Synthetic polypeptide"

SEQ ID NO: 524 - protein, 214 aa, Artificial Sequence; identical to SEQ ID NO: 334
  source: /note="Description of Artificial Sequence: Synthetic polypeptide"

SEQ ID NO: 525 - protein, 5 aa, Artificial Sequence
  source: /note="Description of Artificial Sequence: Synthetic peptide"
SYWYH

SEQ ID NO: 526 - protein, 17 aa, Artificial Sequence
  source: /note="Description of Artificial Sequence: Synthetic peptide"
RIDPQSGGIKYAQKFQG

SEQ ID NO: 527 - protein, 9 aa, Artificial Sequence
  source: /note="Description of Artificial Sequence: Synthetic peptide"
WDYYGYFDV

SEQ ID NO: 528 - protein, 118 aa, Artificial Sequence
  source: /note="Description of Artificial Sequence: Synthetic polypeptide"
EVQLVQSGAEVKKPGASVKVSCKASGYTFTSYWMHWVRQAPGQGLEWMGRIDPQSGGIKYAQKFQGRATLTVDTSTSTAYMELSRLRSDDTAVYYCARWDYYGYFDVWGQGTLVTVSS

SEQ ID NO: 529 - protein, 226 aa, Artificial Sequence
  source: /note="Description of Artificial Sequence: Synthetic polypeptide"
EVQLVQSGAEVKKPGASVKVSCKASGYTFTSYWMHWVRQAPGQGLEWMGRIDPQSGGIKYAQKFQGRATLTVDTSTSTAYMELSRLRSDDTAVYYCARWDYYGYFDVWGQGTLVTVSSASTKGPSVFPLAPSSKSTSGGTAALGCLVKDYFPEPVTVSWNSGALTSGVHTFPAVLQSSGLYSLSSVVTVPSSSLGTQTYICNVNHKPSNTKVDKKVEPKSCDKTHT

SEQ ID NO: 530 - protein, 11 aa, Artificial Sequence
  source: /note="Description of Artificial Sequence: Synthetic peptide"
RASQDITNYLN

SEQ ID NO: 531 - protein, 7 aa, Artificial Sequence
  source: /note="Description of Artificial Sequence: Synthetic peptide"
YTSRLHS

SEQ ID NO: 532 - protein, 9 aa, Artificial Sequence
  source: /note="Description of Artificial Sequence: Synthetic peptide"
QQGDTLPWT

SEQ ID NO: 533 - protein, 107 aa, Artificial Sequence; identical to SEQ ID NO: 333
  source: /note="Description of Artificial Sequence: Synthetic polypeptide"

SEQ ID NO: 534 - protein, 214 aa, Artificial Sequence; identical to SEQ ID NO: 334
  source: /note="Description of Artificial Sequence: Synthetic polypeptide"

SEQ ID NO: 535 - protein, 5 aa, Artificial Sequence
  source: /note="Description of Artificial Sequence: Synthetic peptide"
SYWYH

SEQ ID NO: 536 - protein, 17 aa, Artificial Sequence
  source: /note="Description of Artificial Sequence: Synthetic peptide"
RIDPQSGGIKYAQKFQG

SEQ ID NO: 537 - protein, 9 aa, Artificial Sequence
  source: /note="Description of Artificial Sequence: Synthetic peptide"
WDYGYYFDV

SEQ ID NO: 538 - protein, 118 aa, Artificial Sequence
  source: /note="Description of Artificial Sequence: Synthetic polypeptide"
EVQLVQSGAEVKKPGASVKVSCKASGYTFTSYWMHWVRQAPGQGLEWMGRIDPQSGGIKYAQKFQGRATLTVDTSTSTAYMELSRLRSDDTAVYYCARWDYGYYFDVWGQGTLVTVSS

SEQ ID NO: 539 - protein, 226 aa, Artificial Sequence
  source: /note="Description of Artificial Sequence: Synthetic polypeptide"
EVQLVQSGAEVKKPGASVKVSCKASGYTFTSYWMHWVRQAPGQGLEWMGRIDPQSGGIKYAQKFQGRATLTVDTSTSTAYMELSRLRSDDTAVYYCARWDYGYYFDVWGQGTLVTVSSASTKGPSVFPLAPSSKSTSGGTAALGCLVKDYFPEPVTVSWNSGALTSGVHTFPAVLQSSGLYSLSSVVTVPSSSLGTQTYICNVNHKPSNTKVDKKVEPKSCDKTHT

SEQ ID NO: 540 - protein, 11 aa, Artificial Sequence
  source: /note="Description of Artificial Sequence: Synthetic peptide"
RASQDITNYLN

SEQ ID NO: 541 - protein, 7 aa, Artificial Sequence
  source: /note="Description of Artificial Sequence: Synthetic peptide"
YTSRLHS

SEQ ID NO: 542 - protein, 9 aa, Artificial Sequence
  source: /note="Description of Artificial Sequence: Synthetic peptide"
QQGDTLPWT

SEQ ID NO: 543 - protein, 107 aa, Artificial Sequence; identical to SEQ ID NO: 333
  source: /note="Description of Artificial Sequence: Synthetic polypeptide"

SEQ ID NO: 544 - protein, 214 aa, Artificial Sequence; identical to SEQ ID NO: 334
  source: /note="Description of Artificial Sequence: Synthetic polypeptide"

SEQ ID NO: 545 - protein, 5 aa, Artificial Sequence
  source: /note="Description of Artificial Sequence: Synthetic peptide"
SYYMH

SEQ ID NO: 546 - protein, 17 aa, Artificial Sequence
  source: /note="Description of Artificial Sequence: Synthetic peptide"
RIDPQSGGIKYAQKFQG

SEQ ID NO: 547 - protein, 9 aa, Artificial Sequence
  source: /note="Description of Artificial Sequence: Synthetic peptide"
WDYGGYFDV

SEQ ID NO: 548 - protein, 118 aa, Artificial Sequence; identical to SEQ ID NO: 368
  source: /note="Description of Artificial Sequence: Synthetic polypeptide"

SEQ ID NO: 549 - protein, 226 aa, Artificial Sequence; identical to SEQ ID NO: 369
  source: /note="Description of Artificial Sequence: Synthetic polypeptide"

SEQ ID NO: 550 - protein, 11 aa, Artificial Sequence
  source: /note="Description of Artificial Sequence: Synthetic peptide"
RASQDIYNYLN

SEQ ID NO: 551 - protein, 7 aa, Artificial Sequence
  source: /note="Description of Artificial Sequence: Synthetic peptide"
YTSRLHS

SEQ ID NO: 552 - protein, 9 aa, Artificial Sequence
  source: /note="Description of Artificial Sequence: Synthetic peptide"
QQGDTLPWT

SEQ ID NO: 553 - protein, 107 aa, Artificial Sequence; identical to SEQ ID NO: 163
  source: /note="Description of Artificial Sequence: Synthetic polypeptide"

SEQ ID NO: 554 - protein, 214 aa, Artificial Sequence; identical to SEQ ID NO: 164
  source: /note="Description of Artificial Sequence: Synthetic polypeptide"

SEQ ID NO: 555 - protein, 5 aa, Artificial Sequence
  source: /note="Description of Artificial Sequence: Synthetic peptide"
SYYMH

SEQ ID NO: 556 - protein, 17 aa, Artificial Sequence
  source: /note="Description of Artificial Sequence: Synthetic peptide"
RIDPQSGGIKYAQKFQG

SEQ ID NO: 557 - protein, 9 aa, Artificial Sequence
  source: /note="Description of Artificial Sequence: Synthetic peptide"
WDYGGYFDV

SEQ ID NO: 558 - protein, 118 aa, Artificial Sequence; identical to SEQ ID NO: 368
  source: /note="Description of Artificial Sequence: Synthetic polypeptide"

SEQ ID NO: 559 - protein, 226 aa, Artificial Sequence; identical to SEQ ID NO: 369
  source: /note="Description of Artificial Sequence: Synthetic polypeptide"

SEQ ID NO: 560 - protein, 11 aa, Artificial Sequence
  source: /note="Description of Artificial Sequence: Synthetic peptide"
RASQDITNYLN

SEQ ID NO: 561 - protein, 7 aa, Artificial Sequence
  source: /note="Description of Artificial Sequence: Synthetic peptide"
YTSYLHS

SEQ ID NO: 562 - protein, 9 aa, Artificial Sequence
  source: /note="Description of Artificial Sequence: Synthetic peptide"
QQGDTLPWT

SEQ ID NO: 563 - protein, 107 aa, Artificial Sequence; identical to SEQ ID NO: 223
  source: /note="Description of Artificial Sequence: Synthetic polypeptide"

SEQ ID NO: 564 - protein, 214 aa, Artificial Sequence; identical to SEQ ID NO: 224
  source: /note="Description of Artificial Sequence: Synthetic polypeptide"

SEQ ID NO: 565 - protein, 5 aa, Artificial Sequence
  source: /note="Description of Artificial Sequence: Synthetic peptide"
SYYMH

SEQ ID NO: 566 - protein, 17 aa, Artificial Sequence
  source: /note="Description of Artificial Sequence: Synthetic peptide"
RIDPQSGGIKYAQKFQG

SEQ ID NO: 567 - protein, 9 aa, Artificial Sequence
  source: /note="Description of Artificial Sequence: Synthetic peptide"
WDYGGYFDV

SEQ ID NO: 568 - protein, 118 aa, Artificial Sequence; identical to SEQ ID NO: 368
  source: /note="Description of Artificial Sequence: Synthetic polypeptide"

SEQ ID NO: 569 - protein, 226 aa, Artificial Sequence; identical to SEQ ID NO: 369
  source: /note="Description of Artificial Sequence: Synthetic polypeptide"

SEQ ID NO: 570 - protein, 11 aa, Artificial Sequence
  source: /note="Description of Artificial Sequence: Synthetic peptide"
RASQDITNYLN

SEQ ID NO: 571 - protein, 7 aa, Artificial Sequence
  source: /note="Description of Artificial Sequence: Synthetic peptide"
YTSRLHS

SEQ ID NO: 572 - protein, 9 aa, Artificial Sequence
  source: /note="Description of Artificial Sequence: Synthetic peptide"
QQGDYLPWT

SEQ ID NO: 573 - protein, 107 aa, Artificial Sequence; identical to SEQ ID NO: 303
  source: /note="Description of Artificial Sequence: Synthetic polypeptide"

SEQ ID NO: 574 - protein, 214 aa, Artificial Sequence; identical to SEQ ID NO: 304
  source: /note="Description of Artificial Sequence: Synthetic polypeptide"

SEQ ID NO: 575 - protein, 118 aa, Artificial Sequence
  source: /note="Description of Artificial Sequence: Synthetic polypeptide"
EVQLVQSGAEVKKPGASVKVSCKASGYTFTNYYINWVRQAPGQGLEWMGRIDPQGGGSKYAQKFQGRATLTVDTSTSTAYMELSRLRSDDTAVYYCARWDYGGYFDVWGQGTLVTVSS

SEQ ID NO: 576 - protein, 118 aa, Artificial Sequence
  source: /note="Description of Artificial Sequence: Synthetic polypeptide"
EVQLVQSGAEVKKPGASVKVSCKASGYTFTIYDTHWVRQAPGQGLEWMGRIDPQSGGIKYAQKFQGRATLTVDTSTSTAYMELSRLRSDDTAVYYCARWDYGGYFDVWGQGTLVTVSS

SEQ ID NO: 577 - protein, 118 aa, Artificial Sequence
  source: /note="Description of Artificial Sequence: Synthetic polypeptide"
EVQLVQSGAEVKKPGASVKVSCKASGYTFTNYDIHWVRQAPGQGLEWMGRIDPQDGGIKYAQKFQGRATLTVDTSTSTAYMELSRLRSDDTAVYYCARWDYGGFFDVWGQGTLVTVSS

SEQ ID NO: 578 - protein, 118 aa, Artificial Sequence
  source: /note="Description of Artificial Sequence: Synthetic polypeptide"
EVQLVQSGAEVKKPGASVKVSCKASGYTFTSYYLNWVRQAPGQGLEWMGRIDPWSGGIRYAQKFQGRATLTVDTSTSTAYMELSRLRSDDTAVYYCARWDYGGYFDVWGQGTLVTVSS

SEQ ID NO: 579 - protein, 118 aa, Artificial Sequence
  source: /note="Description of Artificial Sequence: Synthetic polypeptide"
EVQLVQSGAEVKKPGASVKVSCKASGYTFTSYFMNWVRQAPGQGLEWMGRIDPQSGGSKYAQKFQGRATLTVDTSTSTAYMELSRLRSDDTAVYYCARWDYGGYFDVWGQGTLVTVSS

SEQ ID NO: 580 - protein, 118 aa, Artificial Sequence
  source: /note="Description of Artificial Sequence: Synthetic polypeptide"
EVQLVQSGAEVKKPGASVKVSCKASGYTFTRYWISWVRQAPGQGLEWMGRIDPQSGGSRYAQKFQGRATLTVDTSTSTAYMELSRLRSDDTAVYYCARWDYGGYFDVWGQGTLVTVSS

SEQ ID NO: 581 - protein, 118 aa, Artificial Sequence
  source: /note="Description of Artificial Sequence: Synthetic polypeptide"
EVQLVQSGAEVKKPGASVKVSCKASGYTFTSYLMQWVRQAPGQGLEWMGRIDPQSGGVKYAQKFQGRATLTVDTSTSTAYMELSRLRSDDTAVYYCARWDYGGYFDVWGQGTLVTVSS

SEQ ID NO: 582 - protein, 118 aa, Artificial Sequence
  source: /note="Description of Artificial Sequence: Synthetic polypeptide"
EVQLVQSGAEVKKPGASVKVSCKASGYTFTSYWMAWVRQAPGQGLEWMGRIDPSDGGDRYAQKFQGRATLTVDTSTSTAYMELSRLRSDDTAVYYCARWDYGGYFDVWGQGTLVTVSS

SEQ ID NO: 583 - protein, 118 aa, Artificial Sequence
  source: /note="Description of Artificial Sequence: Synthetic polypeptide"
EVQLVQSGAEVKKPGASVKVSCKASGYTFTSYWMQWVRQAPGQGLEWMGRIDPQDGGSKYAQKFQGRATLTVDTSTSTAYMELSRLRSDDTAVYYCARWDYGGYFDVWGQGTLVTVSS

SEQ ID NO: 584 - protein, 118 aa, Artificial Sequence
  source: /note="Description of Artificial Sequence: Synthetic polypeptide"
EVQLVQSGAEVKKPGASVKVSCKASGYTFTSYFMNWVRQAPGQGLEWMGRIDPDRGGSKYAQKFQGRATLTVDTSTSTAYMELSRLRSDDTAVYYCARWHFGGYFDVWGQGTLVTVSS

SEQ ID NO: 585 - protein, 118 aa, Artificial Sequence
  source: /note="Description of Artificial Sequence: Synthetic polypeptide"
EVQLVQSGAEVKKPGASVKVSCKASGYTFTSYLMQWVRQAPGQGLEWMGRIDPQLGDIKYAQKFQGRATLTMDTSTSTAYMELSRLRSDDTAVYYCARWDYGGYFDVWGQGTLVTVSS

SEQ ID NO: 586 - protein, 118 aa, Artificial Sequence
  source: /note="Description of Artificial Sequence: Synthetic polypeptide"
EVQLVQSGAEVKKPGASVKVSCKASGYTFTSYWIQWVRQAPGQGLEWMGRIDPQSGGSKYAQKFQGRATLTVDTSTSTAYMELSRLRSDDTAVYYCARWDYGGYFDVWGQGTLVTVSS

SEQ ID NO: 587 - protein, 118 aa, Artificial Sequence
  source: /note="Description of Artificial Sequence: Synthetic polypeptide"
EVQLVQSGAEVKKPGASVKVSCKASGYTFTRYYMNWVRQAPGQGLEWMGRIDPQSGGVKYAQKFQGRATLTVDTSTSTAYMELSRLRSDDTAVYYCARWDYGGYFDVWGQGTLVTVSS

SEQ ID NO: 588 - protein, 118 aa, Artificial Sequence
  source: /note="Description of Artificial Sequence: Synthetic polypeptide"
EVQLVQSGAEVKKPGASVKVSCKASGYTFTRYLMQWVRQAPGQGLEWMGRIDPESGGVKYAQKFQGRATLTVDTSTSTAYMELSRLRSDDTAVYYCARWDYGGYFDVWGQGTLVTVSS

SEQ ID NO: 589 - protein, 118 aa, Artificial Sequence
  source: /note="Description of Artificial Sequence: Synthetic polypeptide"
EVQLVQSGAEVKKPGASVKVSCKASGYTFTMYWMQWVRQAPGQGLEWMGRIDPISGGSKYAQKFQGRATLTVDTSTSTAYMELSRLRSDDTAVYYCARWDYGGYFDVWGQGTLVTVSS

SEQ ID NO: 590 - protein, 118 aa, Artificial Sequence
  source: /note="Description of Artificial Sequence: Synthetic polypeptide"
EVQLVQSGAEVKKPGASVKVSCKASGYTFTSYWMQWVRQAPGQGLEWMGRIDPQNGGFKYAQKFQGRATLTVDTSTSTAYMELSRLRSDDTAVYYCARWDYGGYFDVWGQGTLVTVSS

SEQ ID NO: 591 - protein, 118 aa, Artificial Sequence
  source: /note="Description of Artificial Sequence: Synthetic polypeptide"
EVQLVQSGAEVKKPGASVKVSCKASGYTFTNYYMAWVRQAPGQGLEWMGRIDPTSGGVKYAQKFQGRATLTVDTSTSTAYMELSRLRSDDTAVYYCARWDYGGYFDVWGHGTLVTVSS

SEQ ID NO: 592 - protein, 118 aa, Artificial Sequence
  source: /note="Description of Artificial Sequence: Synthetic polypeptide"
EVQLVQSGAEVKKPGASVKVSCKASGYTFTRYYIQWVRQAPGQGLEWMGRIDPQDGDIKYAQKFQGRATLTVDTSTSTAYMELSRLRSDDTAVYYCARWDWGGYFDVWGQGTLVTVSS

SEQ ID NO: 593 - protein, 118 aa, Artificial Sequence
  source: /note="Description of Artificial Sequence: Synthetic polypeptide"
EVQLVQSGAEVKKPGASVKVSCKASGYTFTSYLMGWVRQAPGQGLEWMGRIDPQSGGFKYAQKFQGRATLTVDTSTSTAYMELSRLRSDDTAVYYCARWEWGGQFDVWGQGTLVTVSS

SEQ ID NO: 594 - protein, 118 aa, Artificial Sequence
  source: /note="Description of Artificial Sequence: Synthetic polypeptide"
EVQLVQSGAEVKKPGASVKVSCKASGYTFTRYLMHWVRQAPGQGLEWMGRIDPQNGGIRYAQKFQGRATLTVDTSTSTAYMELSRLRSDDTAVYYCARWDYGGYFDVWGQGTLVTVSS

SEQ ID NO: 595 - protein, 118 aa, Artificial Sequence
  source: /note="Description of Artificial Sequence: Synthetic polypeptide"
EVQLVQSGAEVKKPGASVKVSCKASGYTFTSYYLNWVRQAPGQGLEWMGRIDPLGGGIRYAQKFQGRATLTVDTSTSTAYMELSRLRSDDTAVYYCARWDYGGYFDVWGQGTLVTVSS

SEQ ID NO: 596 - protein, 118 aa, Artificial Sequence
  source: /note="Description of Artificial Sequence: Synthetic polypeptide"
EVQLVQSGAEVKKPGASVKVSCKASGYTFTTYWINWVRQAPGQGLEWMGRIDPLSGGVKYAQKFQGRATLTVDTSTSTAYMELSRLRSDDTAVYYCARWDYGGYFDVWGQGTLVTVSS

SEQ ID NO: 597 - protein, 118 aa, Artificial Sequence
  source: /note="Description of Artificial Sequence: Synthetic polypeptide"
EVQLVQSGAEVKKPGASVKVSCKASGYTFTNYDMHWVRQAPGQGLEWMGRIDPQRGGILYAQKFQGRATLTVDTSTSTAYMELSRLRSDDTAVYYCARWDYGGYFDVWGQGTLVTVSS

SEQ ID NO: 598 - protein, 118 aa, Artificial Sequence
  source: /note="Description of Artificial Sequence: Synthetic polypeptide"
EVQLVQSGAEVKKPGASVKVSCKASGYTFTTYDMHWVRQAPGQGLEWMGRIDPQAGDSIYAQKFQGRATLTVDTSTSTAYMELSRLRSDDTAVYYCARWDYGGYFDVWGQGTLVTVSS

SEQ ID NO: 599 - protein, 118 aa, Artificial Sequence
  source: /note="Description of Artificial Sequence: Synthetic polypeptide"
EVQLVQSGAEVKKPGASVKVSCKASGYTFTRYYMNWVRQAPGQGLEWMGRIDPESGRFIYAQKFQGRATLTVDTSTSTAYMELSRLRSDDTAVYYCARWDYGGYFDVWGQGTLVTVSS

SEQ ID NO: 600 - protein, 118 aa, Artificial Sequence
  source: /note="Description of Artificial Sequence: Synthetic polypeptide"
EVQLVQSGAEVKKPGASVKVSCKASGYTFTSYYLNWVRQAPGQGLEWMGRIDPQSGGSKYAQKFQGRATLTVDTSTSTAYMELSRLRSDDTAVYYCARWDYGGYFDVWGQGTLVTVSS

SEQ ID NO: 601 - protein, 118 aa, Artificial Sequence
  source: /note="Description of Artificial Sequence: Synthetic polypeptide"
EVQLVQSGAEVKKPGASVKVSCKASGYTFTSYYMCWVRQAPGQGLEWMGRIDPQSGGVKYAQKFQGRATLTVDTSTSTAYMELSRLRSDDTAVYYCARWDYGGYFDVWGQGTLVTVSS

SEQ ID NO: 602 - protein, 118 aa, Artificial Sequence
  source: /note="Description of Artificial Sequence: Synthetic polypeptide"
EVQLVQSGAEVKKPGASVKVSCKASGYTFTRYLMNWVRQAPGQGLEWMGRIDPEDGGCKYAQKFQGRATLTVDTSTSTAYMELSRLRSDDTAVYYCARWDYGGYFDVWGQGTLVTVSS

SEQ ID NO: 603 - protein, 118 aa, Artificial Sequence
  source: /note="Description of Artificial Sequence: Synthetic polypeptide"
EVQLVQSGAEVKKPGASVKVSCKASGYTFTKYLIQWVRQAPGQGLEWMGRIDPEDGGIIYAQKFQGRATLTVDTSTSTAYMELSRLRSDDTAVYYCARWDYGGQFDVWGQGTLVTVSS

SEQ ID NO: 604 - protein, 118 aa, Artificial Sequence
  source: /note="Description of Artificial Sequence: Synthetic polypeptide"
EVQLVQSGAEVKKPGASVKVSCKASGYTFTSYCMNWVRQAPGQGLEWMGRIDPHSGGVKYAQKFQGRATLTVDTSTSTAYMELSRLRSDDTAVYYCARWDWGGYFDVWGQGTLVTVSS

SEQ ID NO: 605 - protein, 118 aa, Artificial Sequence
  source: /note="Description of Artificial Sequence: Synthetic polypeptide"
EVQLVQSGAEVKKPGASVKVSCKASGYTFTRYYMQWVRQAPGQGLEWMGRIDPESGGAKYAQKFQGRATLTVDTSTSTAYMELSRLRSDDTAVYYCARWDYGGYFDVWGQGTLVTVSS

SEQ ID NO: 606 - protein, 118 aa, Artificial Sequence
  source: /note="Description of Artificial Sequence: Synthetic polypeptide"
EVQLVQSGAEVKKPGASVKVSCKASGYTFTHYYMQWVRQAPGQGLEWMGRIDPPSGDVRYAQKFQGRATLTVDTSTSTAYMELSRLRSDDTAVYYCARWDWGGYFDVWGQGTLVTVSS

SEQ ID NO: 607 - protein, 118 aa, Artificial Sequence
  source: /note="Description of Artificial Sequence: Synthetic polypeptide"
EVQLVQSGAEVKKPGASVKVSCKASGYTFTSYWMQWVRQAPGQGLEWMGRIDPLIGDFKYAQKFQGRATLTVDTSTSTAYMELSRLRSDDTAVYYCARWDYGGYFDVWGQGTLVTVSS

SEQ ID NO: 608 - protein, 118 aa, Artificial Sequence
  source: /note="Description of Artificial Sequence: Synthetic polypeptide"
EVQLVQSGAEVKKPGASVKVSCKASGYTFTRYFMNWVRQAPGQGLEWMGRIDPQEGGIKYAQKFQGRATLTVDTSTSTAYMELSRLRSDDTAVYYCARWDYGGYFDVWGQGTLVTVSS

SEQ ID NO: 609 - protein, 118 aa, Artificial Sequence
  source: /note="Description of Artificial Sequence: Synthetic polypeptide"
EVQLVQSGAEVKKPGASVKVSCKASGYTFTSYDMHWVRQAPGQGLEWMGRIDPQSGGIKYAQKFQGRATLTVDTSTSTAYMELSRLRSDDTAVYYCARWDWGGYFDVWGQGTLVTVSS

SEQ ID NO: 610 - protein, 118 aa, Artificial Sequence
  source: /note="Description of Artificial Sequence: Synthetic polypeptide"
EVQLVQSGAEVKKPGASVKVSCKASGYTFTFYDMHWVRQAPGQGLEWMGRIDPQSGGVKYAQKFQGRATLTVDTSTSTAYMELSRLRSDDTAVYYCARWDYGGYFDVWGQGTLVTVSS

SEQ ID NO: 611 - protein, 118 aa, Artificial Sequence
  source: /note="Description of Artificial Sequence: Synthetic polypeptide"
EVQLVQSGAEVKKPGASVKVSCKASGYTFTRYWLQWVRQAPGQGLEWMGRIDPQIGEFKYAQKFQGRATLTVDTSTSTAYMELSRLRSDDTAVYYCARWDYGGYFDVWGQGTLVTVSS

SEQ ID NO: 612 - protein, 118 aa, Artificial Sequence
  source: /note="Description of Artificial Sequence: Synthetic polypeptide"
EVQLVQSGAEVKKPGASVKVSCKASGYTFTNYDMHWVRQAPGQGLEWMGRIDPESGGIKYAQKFQGRATLTVDTSTSTAYMELSRLRSDDTAVYYCARWDYGGYFDVWGQGTLVTVSS

SEQ ID NO: 613 - protein, 118 aa, Artificial Sequence
  source: /note="Description of Artificial Sequence: Synthetic polypeptide"
EVQLVQSGAEVKKPGASVKVSCKASGYTFTSYWMQWVRQAPGQGLEWMGRIDPQSGGNRYAQKFQGRATLTVDTSTSTAYVELSRLRSDDTAVYYCARWDYGGYFDVWGQGTLVTVSS

SEQ ID NO: 614 - protein, 118 aa, Artificial Sequence
  source: /note="Description of Artificial Sequence: Synthetic polypeptide"
EVQLVQSGAEVKKPGASVKVSCKASGYTFTSYDMHWVRQAPGQGLEWMGRIDPQSGGVKYAQKFQGRATLTVDTSTSTAYMELSRLRSDDTAVYYCARWDYGGYFDVWGQGTLVTVSS

SEQ ID NO: 615 - protein, 118 aa, Artificial Sequence
  source: /note="Description of Artificial Sequence: Synthetic polypeptide"
EVQLVQSGAEVKKPGASVKVSCKASGYTFTGYLMQWVRQAPGQGLEWMGRIDPQSGGIKYAQKFQGRATLTVDTSTSTAYMELSRLRSDDTAVYYCARWDYGGYFDVWGQGTLVTVSS

SEQ ID NO: 616 - protein, 118 aa, Artificial Sequence
  source: /note="Description of Artificial Sequence: Synthetic polypeptide"
EVQLVQSGAEVKKPGASVKVSCKASGYTFTAYDIHWVRQAPGQGLEWMGRIDPQSGGIKYAQKFQGRATLTVDTSTSTAYMELSRLRSDDTAVYYCARWDYGGYFDVWGQGTLVTVSS

SEQ ID NO: 617 - protein, 118 aa, Artificial Sequence
  source: /note="Description of Artificial Sequence: Synthetic polypeptide"
EVQLVQSGAEVKKPGASVKVSCKASGYTFTSYLMQWVRQAPGQGLEWMGRIDPDSGGILYAQKFQGRATLTVDTSTSTAYMELSRLRSDDTAVYYCARWDYGGYFDVWGQGTLVTVSS

SEQ ID NO: 618 - protein, 118 aa, Artificial Sequence
  source: /note="Description of Artificial Sequence: Synthetic polypeptide"
EVQLVQSGAEVKKPGASVKVSCKASGYTFTSYYINWVRQAPGQGLEWMGRIDPDSGGFKYAQKFQGRATLTVDTSTSTAYMELSRLRSDDTAVYYCARWDYGGYFDVWGQGTLVTVSS

SEQ ID NO: 619 - protein, 118 aa, Artificial Sequence
  source: /note="Description of Artificial Sequence: Synthetic polypeptide"
EVQLVQSGAEVKKPGASVKVSCKASGYTFTRYWMQWVRQAPGQGLEWMGRIDPQDGGIKYAQKFQGRATLTVDTSTSTAYMELSRLRSDDTAVYYCARFDYGGYFDVWGQGTLVTVSS

SEQ ID NO: 620 - protein, 118 aa, Artificial Sequence
  source: /note="Description of Artificial Sequence: Synthetic polypeptide"
EVQLVQSGAEVKKPGASVKVSCKASGYTFTSYLLHWVRQAPGQGLEWMGRIDPEDGGIIYAQKFQGRATLTVDTSTSTAYMELSRLRSDDTAVYYCARWDYGGYFDVWGQGTLVTVSS

SEQ ID NO: 621 - protein, 118 aa, Artificial Sequence
  source: /note="Description of Artificial Sequence: Synthetic polypeptide"
EVQLVQSGAEVKKPGASVKVSCKASGYTFTRYLMNWVRQAPGQGLEWMGRIDPLDGDIKYAQKFQGRATLTVDTSTSTAYMELSRLRSDDTAVYYCARWDYGGYFDVWGQGTLVTVSS

SEQ ID NO: 622 - protein, 118 aa, Artificial Sequence
  source: /note="Description of Artificial Sequence: Synthetic polypeptide"
EVQLVQSGAEVKKPGASVKVSCKASGYTFTRYYMSWVRQAPGQGLEWMGRIDPESGGIKYAQKFQGRATLTVDTSTSTAYMELSRLRSDDTAVYYCARWDYGGYFDVWGQGTLVTVSS

SEQ ID NO: 623 - protein, 107 aa, Artificial Sequence
  source: /note="Description of Artificial Sequence: Synthetic polypeptide"
DIQMTQSPSSLSASVGDRVTITCRASQDIWYYLNWYQQKPGKAVKLLIYYTSRLETGVPSRFSGSGSGTDYTLTISSLQPEDFATYFCQQGDTLPWTFGQGTKLEIK

SEQ ID NO: 624 - protein, 107 aa, Artificial Sequence
  source: /note="Description of Artificial Sequence: Synthetic polypeptide"
DIQMTQSPSSLSASVGDRVTITCRASQDIWNYLNWYQQKPGKAVKLLIYYTSLLHSGVPSRFSGSGSGTDYTLTISSLQPEDFATYFCQQGDALPWTFGQGTKLEIK

SEQ ID NO: 625 - protein, 107 aa, Artificial Sequence
  source: /note="Description of Artificial Sequence: Synthetic polypeptide"
DIQMTQSPSSLSASVGDRVTITCRASQDIWNYLNWYQQKPGKAVKLLIYYTSSLETGVPSRFSGSGSGTDYTLTISSLQPEDFATYFCQQGDTLPWTFGQGTKLEIK

SEQ ID NO: 626 - protein, 107 aa, Artificial Sequence
  source: /note="Description of Artificial Sequence: Synthetic polypeptide"
DIQMTQSPSSLSASVGDRVTITCRASQDIWHYLNWYQQKPGKAVKLLIYYTSMLETGVPSRFSGSGSGTDYTLTISSLQPEDFATYFCQQGDTIPWTFGQGTKLEIK

SEQ ID NO: 627 - protein, 107 aa, Artificial Sequence
  source: /note="Description of Artificial Sequence: Synthetic polypeptide"
DIQMTQSPSSLSASVGDRVTITCRASQDIWNYLNWYQQKPGKAVKLLIYYSSMLETGVPSRFSGSGSGTDYTLTISSLQPEDFATYFCQQGDILPWTFGQGTKLEIK

SEQ ID NO: 628 - protein, 107 aa, Artificial Sequence
  source: /note="Description of Artificial Sequence: Synthetic polypeptide"
DIQMTQSPSSLSASVGDRVTITCRASQDIWHYLNWYQQKPGKAVKLLIYYTSCLETGVPSRFSGSGSGTDYTLTISSLQPEDFATYFCQQGDTLPWTFGQGTKLEIK

SEQ ID NO: 629 - protein, 107 aa, Artificial Sequence
  source: /note="Description of Artificial Sequence: Synthetic polypeptide"
DIQMTQSPSSLSASVGDRVTITCRASQDIWNYLNWYQQKPGKAVKLLIYYTSRLETGVPSRFSGSGSGTDYTLTISSLQPEDFATYFCQQGDILPWTFGQGTELEIK

SEQ ID NO: 630 - protein, 107 aa, Artificial Sequence
  source: /note="Description of Artificial Sequence: Synthetic polypeptide"
DIQMTQSPSSLSASVGDRVTITCRASQDIWNYLNWYQQKPGKAVKLLIYYTSRLHSGVPSRFSGSGSGTDYTLTISSLQPEDFATYFCQQGDTLPWTFGQGTKLEIK

SEQ ID NO: 631 - protein, 107 aa, Artificial Sequence
  source: /note="Description of Artificial Sequence: Synthetic polypeptide"
DIQMTQSPSSLSASVGDRVTITCRASQDIWNYLNWYQQKPGKAVKLLIYYTSGLETGVPSRFSGSGSGTDYTLTISSLQPEDFATYFCQQGDTIPWTFGQGTKLEIK

SEQ ID NO: 632 - protein, 107 aa, Artificial Sequence
  source: /note="Description of Artificial Sequence: Synthetic polypeptide"
DIQMTQSPSSLSASVGDRVTITCRASQDIWHYLNWYQQKPGKAVKLLIYYTSRLETGVPSRFSGSGSGTDYTLTISSLQPEDFATYFCQQGDILPWTFGQGTKLEIK

SEQ ID NO: 633 - protein, 107 aa, Artificial Sequence
  source: /note="Description of Artificial Sequence: Synthetic polypeptide"
DIQMTQSPSSLSASVGDRVTITCRASQDIWYYLNWYQQKPGKAVKLLIYYTSGLETGVPSRFSGSGSGTDYTLTISSLQPEDFATYFCQQGDTLPWTFGQGTKLEIK

SEQ ID NO: 634 - protein, 107 aa, Artificial Sequence
  source: /note="Description of Artificial Sequence: Synthetic polypeptide"
DIQMTQSPSSLSASVGDRVTITCRASQDIWNYLNWYQQKPGKAVKLLIYYTSRLETGVPSRFSGSGSGTDYTLTISSLQPEDFATYFCQQGDALPWTFGQGTKLEIK

SEQ ID NO: 635 - protein, 107 aa, Artificial Sequence
  source: /note="Description of Artificial Sequence: Synthetic polypeptide"
DIQMTQSPSSLSASVGDRVTITCRASQDIWNYLNWYQQKPGKAVKLLIYYTSGLETGVPSRFSGSGSGTDYTLTISSLQPEDFATYFCQQGDTLPWTFGQGTKLEIK

SEQ ID NO: 636 - protein, 107 aa, Artificial Sequence
  source: /note="Description of Artificial Sequence: Synthetic polypeptide"
DIQMTQSPSSLSASVGDRVTITCRASQDIYKYLNWYQQKPGKAVKLLIYYTSGLETGVPSRFSGSGSGTDYTLTISSLQPEDFATYFCQQGDTLPWTFGQGTKLEIK

SEQ ID NO: 637 - protein, 107 aa, Artificial Sequence
  source: /note="Description of Artificial Sequence: Synthetic polypeptide"
DIQMTQSPSSLSASVGDRVTITCRASQDIWNYLNWYQQKPGKAVKLLIYYTSGLETGVPSRFSGSGSGTDYTLTISSLQPEDFATYFCQQGDNLPWTFGQGTKLEIK

SEQ ID NO: 638 - protein, 107 aa, Artificial Sequence
  source: /note="Description of Artificial Sequence: Synthetic polypeptide"
DIQMTQSPSSLSASVGDRVTITCRASQDIWNYLNWYQQKPGKAVKLLIYYSSVLETGVPSRFSGSGSGTDYTLTISSLQPEDFATYFCQQGDTLPWTFGQGTKLEIK

SEQ ID NO: 639 - protein, 107 aa, Artificial Sequence
  source: /note="Description of Artificial Sequence: Synthetic polypeptide"
DIQMTQSPSSLSASVGDRVTITCRASQDIWNYLNWYQQKPGKAVKLLIYYTSNLETGVPSRFSGSGSGTDYTLTISSLQPEDFATYFCQQGDTLPWTFGQGTKLEIK

SEQ ID NO: 640 - protein, 107 aa, Artificial Sequence
  source: /note="Description of Artificial Sequence: Synthetic polypeptide"
DIQMTQSPSSLSASVGDRVTITCRASQDIWSYLNWYQQKPGKAVKLLIYYTSGLETGVPSRFSGSGSGTDYTLTISSLQPEDFATYFCQQGDTLPWTFGQGTKLEIK

SEQ ID NO: 641 - protein, 107 aa, Artificial Sequence
  source: /note="Description of Artificial Sequence: Synthetic polypeptide"
DIQMTQSPSSLSASVGDRVTITCRASQDIWNYLNWYQQKPGKAVKLLIYYTSILETGVPSRFSGSGSGTDYTLTISSLQPEDFATYFCQQGDTLPWTFGQGTKLEIK

SEQ ID NO: 642 - protein, 107 aa, Artificial Sequence
  source: /note="Description of Artificial Sequence: Synthetic polypeptide"
DIQMTQSPSSLSASVGDRVTITCRASQDIWNYLNWYQQKPGKAVKLLIYYTSMLETGVPSRFSGSGSGTDYTLTISSLQPEDFATYFCQQGDTIPWTFGQGTKLEIK

SEQ ID NO: 643 - protein, 107 aa, Artificial Sequence
  source: /note="Description of Artificial Sequence: Synthetic polypeptide"
DIQMTQSPSSLSASVGDRVTITCRASQDIWNYLNWYQQKPGKAVKLLIYYTSSLETGVPSRFSGSGSGTDYTLTISSLQPEDFATYFCQQGDILPWTFGQGTKLEIK

SEQ ID NO: 644 - protein, 107 aa, Artificial Sequence
  source: /note="Description of Artificial Sequence: Synthetic polypeptide"
DIQMTQSPSSLSASVGDRVTITCRASQDIWNYLNWYQQKPGKAVKLLIYYTSRLETGVPSRFSGSGSGTDYTLTISSLQPEDFATYFCQQGDTLPWTFGQGTKLEIK

SEQ ID NO: 645 - protein, 107 aa, Artificial Sequence
  source: /note="Description of Artificial Sequence: Synthetic polypeptide"
DIQMTQSPSSLSASVGDRVTITCRASQDIWSYLNWYQQKPGKAVKLLIYYTSRLHSGVPSRFSGSGSGTDYTLTISSLQPEDFATYFCQQGDALPWTFGQGTKLEIK

SEQ ID NO: 646 - protein, 107 aa, Artificial Sequence
  source: /note="Description of Artificial Sequence: Synthetic polypeptide"
DIQMTQSPSSLSASVGDRVTITCRASQDIWNYLNWYQQKPGKAVKLLIYYTSRLETGVPSRFSGSGSGTDYTLTISSLQPEDFATYFCQQGDLLPWTFGQGTKLEIK

SEQ ID NO: 647 - protein, 107 aa, Artificial Sequence
  source: /note="Description of Artificial Sequence: Synthetic polypeptide"
DIQMTQSPSSLSASVGDRVTITCRASQDIYNYLNWYQQKPGKAVKLLIYYTSRLETGVPSRFSGSGSGTDYTLTISSLQPEDFATYFCQQGDMLPWTFGQGTKLEIK

SEQ ID NO: 648 - protein, 107 aa, Artificial Sequence
  source: /note="Description of Artificial Sequence: Synthetic polypeptide"
DIQMTQSPSSLSASVGDRVTITCRASQDIWNYLNWYQQKPGKAVKLLIYYTSSLETGVPSRFSGSGSGTDYTLTISSLQPEDFATYFCQQGDIMPWTFGQGTKLEIK

SEQ ID NO: 649 - protein, 107 aa, Artificial Sequence
  source: /note="Description of Artificial Sequence: Synthetic polypeptide"
DIQMTQSPSSLSASVGDRVTITCRASQDIWNYLNWYQQKPGKAVKLLIYYTSTLETGVPSRFSGSGSGTDYTLTISSLQPEDFATYFCQQGDMLPWTFGQGTKLEIK

SEQ ID NO: 650 - protein, 107 aa, Artificial Sequence
  source: /note="Description of Artificial Sequence: Synthetic polypeptide"
DIQMTQSPSSLSASVGDRVTITCRASQDIWSYLNWYQQKPGKAVKLLIYYTSGLHSGVPSRFSGSGSGTDYTLTISSLQPEDFATYFCQQGDALPWTFGQGTKLEIK

SEQ ID NO: 651 - protein, 107 aa, Artificial Sequence
  source: /note="Description of Artificial Sequence: Synthetic polypeptide"
DIQMTQSPSSLSASVGDRVTITCRASQDIWNYLNWYQQKPGKAVKLLIYYTSILHSGVPSRFSGSGSGTDYTLTISSLQPEDFATYFCQQGDTLPWTFGQGTKLEIK

SEQ ID NO: 652 - protein, 107 aa, Artificial Sequence
  source: /note="Description of Artificial Sequence: Synthetic polypeptide"
DIQMTQSPSSLSASVGDRVTITCRASQDIWNYLNWYQQKPGKAVKLLIYYTSWLETGVPSRFSGSGSGTDYTLTISSLQPEDFATYFCQQGDTLPWTFGQGTKLEIK

SEQ ID NO: 653 - protein, 107 aa, Artificial Sequence
  source: /note="Description of Artificial Sequence: Synthetic polypeptide"
DIQMTQSPSSLSASVGDRVTITCRASQDIWNYLNWYQQKPGKAVKLLIYYTSGLHSGVPSRFSGSGSGTDYTLTISSLQPEDFATYFCQQGDSLPWTFGQGTKLEIK

SEQ ID NO: 654 - protein, 107 aa, Artificial Sequence
  source: /note="Description of Artificial Sequence: Synthetic polypeptide"
DIQMTQSPSSLSASVGDRVTITCRASQDIWNYLNWYQQKPGKAVKLLIYYTSLLHSGVPSRFSGSGSGTDYTLTISSLQPEDFATYFCQQGDTLPWTFGQGTKLEIK

SEQ ID NO: 655 - protein, 107 aa, Artificial Sequence
  source: /note="Description of Artificial Sequence: Synthetic polypeptide"
DIQMTQSPSSLSASVGDRVTITCRASQDIWHYLNWYQQKPGKAVKLLIYYTSLLETGVPSRFSGSGSGTDYTLTISSLQPEDFATYFCQQGDTLPWTFGQGTKLEIK

SEQ ID NO: 656 - protein, 107 aa, Artificial Sequence
  source: /note="Description of Artificial Sequence: Synthetic polypeptide"
DIQMTQSPSSLSASVGDRVTITCRASQDIWNYLNWYQQKPGKAVKLLIYYTSMLETGVPSRFSGSGSGTDYTLTISSLQPEDFATYFCQQGDMLPWTFGQGTKLEIK

SEQ ID NO: 657 - protein, 107 aa, Artificial Sequence
  source: /note="Description of Artificial Sequence: Synthetic polypeptide"
DIQMTQSPSSLSASVGDRVTITCRASQDIWSYLNWYQQKPGKAVKLLIYYTSRLHSGVPSRFSGSGSGTDYTLTISSLQPEDFATYFCQQGDTLPWTFGQGTKLEIK

SEQ ID NO: 658 - protein, 107 aa, Artificial Sequence
  source: /note="Description of Artificial Sequence: Synthetic polypeptide"
DIQMTQSPSSLSASVGDRVTITCRASQDIWNYLNWYQQKPGKAVKLLIYYTSGLETGVPSRFSGSGSGTDYTLTISSLQPEDFATYFCQQGDALPWTFGQGTKLEIK

SEQ ID NO: 659 - protein, 107 aa, Artificial Sequence
  source: /note="Description of Artificial Sequence: Synthetic polypeptide"
DIQMTQSPSSLSASVGDRVTITCRASQDIWNYLNWYQQKPGKAVKLLIYYTSMLETGVPSRFSGSGSGTDYTLTISSLQPEDFATYFCQQGDTLPWTFGQGTKLEIK

SEQ ID NO: 660 - protein, 107 aa, Artificial Sequence
  source: /note="Description of Artificial Sequence: Synthetic polypeptide"
DIQMTQSPSSLSASVGDRVTITCRASQDIWSYLNWYQQKPGKAVKLLIYYTSWLETGVPSRFSGSGSGTDYTLTISSLQPEDFATYFCQQGDTLPWTFGQGTKLEIK

SEQ ID NO: 661 - protein, 118 aa, Artificial Sequence
  source: /note="Description of Artificial Sequence: Synthetic polypeptide"
EVQLVQSGAEVKKPGASVKVSCKASGYTFTRYDIHWVRQAPGQGLEWMGRIDPQSGGSKYAQKFQGRATLTVDTSTSTAYMELSRLRSDDTAVYYCARWDYGGYFDVWGQGTLVTVSS

SEQ ID NO: 662 - protein, 118 aa, Artificial Sequence
  source: /note="Description of Artificial Sequence: Synthetic polypeptide"
EVQLVQSGAEVKKPGASVKVSCKASGYTFTRYDIHWVRQAPGQGLEWMGRIDPQSGGTKYAQKFQGRATLTVDTSTSTAYMELSRLRSDDTAVYYCARWDYGGYFDVWGQGTLVTVSS

SEQ ID NO: 663 - protein, 118 aa, Artificial Sequence
  source: /note="Description of Artificial Sequence: Synthetic polypeptide"
EVQLVQSGAEVKKPGASVKVSCKASGYTFTSYSMHWVRQAPGQGLEWMGRIDPQDGDIKYAQKFQGRATLTVDTSTSTAYMELSRLRSDDTAVYYCARWDYGGYFDVWGQGTLVTVSS

SEQ ID NO: 664 - protein, 118 aa, Artificial Sequence
  source: /note="Description of Artificial Sequence: Synthetic polypeptide"
EVQLVQSGAEVKKPGASVKVSCKASGYTFTSYDVHWVRQAPGQGLEWMGRIDPDGGDIKYAQKFQGRATLTVDTSTSTAYMELSRLRSDDTAVYYCARWDYGGYFDVWGQGTLVTVSS

SEQ ID NO: 665 - protein, 118 aa, Artificial Sequence
  source: /note="Description of Artificial Sequence: Synthetic polypeptide"
EVQLVQSGAEVKKPGASVKVSCKASGYTFTSYLMAWVRQAPGQGLEWMGRIDPQSGGIKYAQKFQGRATLTVDTSTSTAYMELSRLRSDDTAVYYCARWDYGGQFDVWGQGTLVTVSS

SEQ ID NO: 666 - protein, 118 aa, Artificial Sequence
  source: /note="Description of Artificial Sequence: Synthetic polypeptide"
EVQLVQSGAEVKKPGASVKVSCKASGYTFTSYYMNWVRQAPGQGLEWMGRIDPLSGGIKYAQKFQGRATLTVDTSTSTAYMELSRLRSDDTAVYYCARYDYGGFFDVWGQGTLVTVSS

SEQ ID NO: 667 - protein, 118 aa, Artificial Sequence
  source: /note="Description of Artificial Sequence: Synthetic polypeptide"
EVQLVQSGAEVKKPGASVKVSCKASGYTFTSYDLHWVRQAPGQGLEWMGRIDPQSGGIKYAQKFQGRATLTVDTSTSTAYMELSRLRSDDTAVYYCARWDYGGYFDVWGQGTLVTVSS

SEQ ID NO: 668 - protein, 118 aa, Artificial Sequence
  source: /note="Description of Artificial Sequence: Synthetic polypeptide"
EVQLVQSGAEVKKPGASVKVSCKASGYTFTSYWMQWVRQAPGQGLEWMGRIDPQSGGILYAQKFQGRATLTVDTSTSTAYMELSRLRSDDTAVYYCARWDYGGYFDVWGQGTLVTVSS

SEQ ID NO: 669 - protein, 118 aa, Artificial Sequence
  source: /note="Description of Artificial Sequence: Synthetic polypeptide"
EVQLVQSGAEVKKPGASVKVSCKASGYTFTRYDLYWVRQAPGQGLEWMGRIDPEGGGVKYAQKFQGRATLTVDTSTSTAYMELSRLRSDDTAVYYCARWDYGGYFDVWGQGTLVTVSS

SEQ ID NO: 670 - protein, 118 aa, Artificial Sequence
  source: /note="Description of Artificial Sequence: Synthetic polypeptide"
EVQLVQSGAEVKKPGASVKVSCKASGYTFTSYFMQWVRQAPGQGLEWMGRIDPQSGGIKYAQKFQGRATLTVDTSTSTAYMELSKLRSDDTAVYYCARWDYGGYFDVWGQGTLVTVSS

SEQ ID NO: 671 - protein, 118 aa, Artificial Sequence
  source: /note="Description of Artificial Sequence: Synthetic polypeptide"
EVQLVQSGAEVKKPGASVKVSCKASGYTFTSYYISWVRQAPGQGLEWMGRIDPNSGGIKYAQKFQGRATLTVDTSTSTAYMELSRLRSDDTAVYYCARYDHGGYFDVWGQGTLVTVSS

SEQ ID NO: 672 - protein, 118 aa, Artificial Sequence
  source: /note="Description of Artificial Sequence: Synthetic polypeptide"
EVQLVQSGAEVKKPGASVKVSCKASGYTFTSYFLNWVRQAPGQGLEWMGRIDPQDGGIKYAQKFQGRATLTVDTSTSTAYMELSRLRSDDTAVYYCARWDYGGYFDVWGQGTLVTVSS

SEQ ID NO: 673 - protein, 118 aa, Artificial Sequence
  source: /note="Description of Artificial Sequence: Synthetic polypeptide"
EVQLVQSGAEVKKPGASVKVSCKASGYTFTRYLMQWVRQAPGQGLEWMGRIDPQSGGIRYAQKFQGRATLTVDTSTSTAYMELSRLRSDDTAVYYCARWDYGGYFDVWGQGTLVTVSS

SEQ ID NO: 674 - protein, 118 aa, Artificial Sequence; identical to SEQ ID NO: 616
  source: /note="Description of Artificial Sequence: Synthetic polypeptide"

SEQ ID NO: 675 - protein, 118 aa, Artificial Sequence; identical to SEQ ID NO: 618
  source: /note="Description of Artificial Sequence: Synthetic polypeptide"

SEQ ID NO: 676 - protein, 118 aa, Artificial Sequence
  source: /note="Description of Artificial Sequence: Synthetic polypeptide"
EVQLVQSGAEVKKPGASVKVSCKASGYTFTSYDLHWVRQAPGQGLEWMGRIDPQSGGILYAQKFQGRATLTVDTSTSTAYMELSRLRSDDTAVYYCARWDYGGFFDVWGQGTLVTVSS

SEQ ID NO: 677 - protein, 118 aa, Artificial Sequence
  source: /note="Description of Artificial Sequence: Synthetic polypeptide"
EVQLVQSGAEVKKPGASVKVSCKASGYTFTRYDVHWVRQAPGQGLEWMGRIDPQSGGKKYAQKFQGRATLTVDTSTSTAYMELSRLRSDDTAVYYCARWDYGGYFDVWGQGTLVTVSS

SEQ ID NO: 678 - protein, 118 aa, Artificial Sequence
  source: /note="Description of Artificial Sequence: Synthetic polypeptide"
EVQLVQSGAEVKKPGASVKVSCKASGYTFTSYLMQWVRQAPGQGLEWMGRIDPQSGGIIYAQKFQGRATLTVDTSTSTAYMELSRLRSDDTAVYYCARWDYGGYFDVWGQGTLVTVSS

SEQ ID NO: 679 - protein, 118 aa, Artificial Sequence
  source: /note="Description of Artificial Sequence: Synthetic polypeptide"
EVQLVQSGAEVKKPGASVKVSCKASGYTFTRYLMQWVRQAPGQGLEWMGRIDPQSGGIIYAQKFQGRATLTVDTSTSTAYMELSRLRSDDTAVYYCARWDYGGYFDVWGQGTLVTVSS

SEQ ID NO: 680 - protein, 118 aa, Artificial Sequence
  source: /note="Description of Artificial Sequence: Synthetic polypeptide"
EVQLVQSGAEVKKPGASVKVSCKASGYTFTRYLMQWVRQAPGQGLEWMGRIDPQSGGVIYAQKFQGRATLTVDTSTSTAYMELSRLRSDDTAVYYCARWDFGGYFDVWGQGTLVTVSS

SEQ ID NO: 681 - protein, 118 aa, Artificial Sequence
  source: /note="Description of Artificial Sequence: Synthetic polypeptide"
EVQLVQSGAEVKKPGASVKVSCKASGYTFTSYWMQWVRQAPGQGLEWMGRIDPPSGGVIYAQKFQGRATLTVDTSTSTAYMELSRLRSDDTAVYYCARWDYGGYFDVWGQGTLVTVSS

SEQ ID NO: 682 - protein, 118 aa, Artificial Sequence
  source: /note="Description of Artificial Sequence: Synthetic polypeptide"
EVQLVQSGAEVKKPGASVKVSCKASGYTFTAYLMQWVRQAPGQGLEWMGRIDPEDGGVKYAQKFQGRATLTVDTSTSTAYMELSRLRSDDTAVYYCARWDYGGYFDVWGQGTLVTVSS

SEQ ID NO: 683 - protein, 118 aa, Artificial Sequence
  source: /note="Description of Artificial Sequence: Synthetic polypeptide"
EVQLVQSGAEVKKPGASVKVSCKASGYTFTSYFMNWVRQAPGQGLEWMGRIDPQSGGIKYAQKFQGRATLTVDTSTSTAYMELSRLRSDDTAVYYCARWDYGGYFDVWGQGTLVTVSS

SEQ ID NO: 684 - protein, 118 aa, Artificial Sequence
  source: /note="Description of Artificial Sequence: Synthetic polypeptide"
EVQLVQSGAEVKKPGASVKVSCKASGYTFTSYWIQWVRQAPGQGLEWMGRIDPEDGGIKYAQKFQGRATLTVDTSTSTAYMELSRLRSDDTAVYYCARWDYGGYFDVWGQGTLVTVSS

SEQ ID NO: 685 - protein, 118 aa, Artificial Sequence
  source: /note="Description of Artificial Sequence: Synthetic polypeptide"
EVQLVQSGAEVKKPGASVKVSCKASGYTFTSYWMQWVRQAPGQGLEWMGRIDPHDGGIKYAQKFQGRATLTVDTSTSTAYMELSRLRSDDTAVYYCARWDYGGYFDVWGQGTLVTVSS

SEQ ID NO: 686 - protein, 107 aa, Artificial Sequence
  source: /note="Description of Artificial Sequence: Synthetic polypeptide"
DIQMTQSPSSLSASVGDRVTITCRASQDISNYLNWYQQKPGKAVKLLIYYTSMLETGVPSRFSGSGSGTDYTLTISSLQPEDFATYFCQQGDALPWTFGRGTKLEIK

SEQ ID NO: 687 - protein, 107 aa, Artificial Sequence
  source: /note="Description of Artificial Sequence: Synthetic polypeptide"
DIQMTQSPSSLSASVGDRVTITCRASQDIYNYLNWYQQKPGKAVKLLIYYTSGLETGVPSRFSGSGSGTDYTLTISSLQPEDFATYFCQQGDTLPWTFGQGTKLEIK

SEQ ID NO: 688 - protein, 107 aa, Artificial Sequence
  source: /note="Description of Artificial Sequence: Synthetic polypeptide"
DIQMTQSPSSLSASVGDRVTITCRASQDIYNYLNWYQQKPGKAVKLLIYYTSILETGVPSRFSGSGSGTDYTLTISSLQPEDFATYFCQQGDTLPWTFGQGTKLEIK

SEQ ID NO: 689 - protein, 107 aa, Artificial Sequence
  source: /note="Description of Artificial Sequence: Synthetic polypeptide"
DIQMTQSPSSLSASVGDRVTITCRASQDIYNYLNWYQQKPGKAVKLLIYYTSRLETGVPSRFSGSGSGTDYTLTISSLQPEDFATYFCQQGDILPWTFGQGTKLEIK

SEQ ID NO: 690 - protein, 107 aa, Artificial Sequence
  source: /note="Description of Artificial Sequence: Synthetic polypeptide"
DIQMTQSPSSLSASVGDRVTITCRASQDIFNYLNWYQQKPGKAVKLLIYYASTLHSGVPSRFSGSGSGTDYTLTISSLQPEDFATYFCQQGDTLPWTFGQGTKLEIK

SEQ ID NO: 691 - protein, 107 aa, Artificial Sequence
  source: /note="Description of Artificial Sequence: Synthetic polypeptide"
DIQMTQSPSSLSASVGDRVTITCRASQDIYSYLNWYQQKPGKAVKLLIYYTSRLHSGVPSRFSGSGSGTDYTLTISSLQPEDFATYFCQQGDQLPWTFGQGTKLEIK

SEQ ID NO: 692 - protein, 107 aa, Artificial Sequence
  source: /note="Description of Artificial Sequence: Synthetic polypeptide"
DIQMTQSPSSLSASVGDRVTITCRASQDIYNYLNWYQQKPGKAVKLLIYYTSKLHSGVPSRFSGSGSGTDYTLTISSLQPEDFATYFCQQGDILPWTFGQGTKLEIK

SEQ ID NO: 693 - protein, 107 aa, Artificial Sequence
  source: /note="Description of Artificial Sequence: Synthetic polypeptide"
DIQMTQSPSSLSASVGDRVTITCRASQDIYNYLNWYQQKPGKAVKLLIYYTSQLETGVPSRFSGSGSGTDYTLTISSLQPEDFATYFCQQGDTLPWTFGQGTKLEIK

SEQ ID NO: 694 - protein, 107 aa, Artificial Sequence
  source: /note="Description of Artificial Sequence: Synthetic polypeptide"
DIQMTQSPSSLSASVGDRVTITCRASQDIYNYLNWYQQKPGKAVKLLIYYTSRLETGVPSRFSGSGSGTDYTLTISSLQPEDFATYFCQQGDTLPWTFGQGTKLEIK

SEQ ID NO: 695 - protein, 107 aa, Artificial Sequence
  source: /note="Description of Artificial Sequence: Synthetic polypeptide"
DIQMTQSPSSLSASVGDRVTITCRASQDIFHYLNWYQQKPGKAVKLLIYYTSELETGVPSRFSGSGSGTDYTLTISSLQPEDFATYFCQQGDTLPWTFGQGTKLEIK

SEQ ID NO: 696 - protein, 107 aa, Artificial Sequence
  source: /note="Description of Artificial Sequence: Synthetic polypeptide"
DIQMTQSPSSLSASVGDRVTITCRASQDIYNYLNWYQQKPGKAVKLLIYYTSRLETGVPSRFSGSGSGTDYTLTISSLQPEDFATYFCQQGDSIPWTFGQGTKLEIK

SEQ ID NO: 697 - protein, 107 aa, Artificial Sequence
  source: /note="Description of Artificial Sequence: Synthetic polypeptide"
DIQMTQSPSSLSASVGDRVTITCRASQDIYNYLNWYQQKPGKAVKLLIYYTSGLHSGVPSRFSGSGSGTDYTLTISSLQPEDFATYFCQQGDALPWTFGQGTKLEIK

SEQ ID NO: 698 - protein, 107 aa, Artificial Sequence
  source: /note="Description of Artificial Sequence: Synthetic polypeptide"
DIQMTQSPSSLSASVGDRVTITCRASQDIYYYLNWYQQKPGKAVKLLIYYTSGLETGVPSRFSGSGSGTDYTLTISSLQPEDFATYFCQQGDTLPWTFGQGTKLEIK

SEQ ID NO: 699 - protein, 107 aa, Artificial Sequence
  source: /note="Description of Artificial Sequence: Synthetic polypeptide"
DIQMTQSPSSLSASVGDRVTITCRASQDIFNYLNWYQQKPGKAVKLLIYYTSSLETGVPSRFSGSGSGTDYTLTISSLQPEDFATYFCQQGDSLPWTFGQGTKLEIK

SEQ ID NO: 700 - protein, 107 aa, Artificial Sequence
  source: /note="Description of Artificial Sequence: Synthetic polypeptide"
DIQMTQSPSSLSASVGDRVTITCRASQDISNYLNWYQQKPGKAVKLLIYYTSMLETGVPSRFSGSGSGTDYTLTISSLQPEDFATYFCQQGDILPWTFGQGTKLEIK

SEQ ID NO: 701 - protein, 107 aa, Artificial Sequence
  source: /note="Description of Artificial Sequence: Synthetic polypeptide"
DIQMTQSPSSLSASVGDRVTITCRASQDIANYLNWYQQKPGKAVKLLIYYTSMLETGVPSRFSGSGSGTDYTLTISSLQPEDFATYFCQQGETLPWTFGQGTKLEIK

SEQ ID NO: 702 - protein, 107 aa, Artificial Sequence
  source: /note="Description of Artificial Sequence: Synthetic polypeptide"
DIQMTQSPSSLSASVGDRVTITCRASQDIFSYLNWYQQKPGKAVKLLIYYTSILETGVPSRFSGSGSGTDYTLTISSLQPEDFATYFCQQGDTLPWTFGQGTKLEIK

SEQ ID NO: 703 - protein, 107 aa, Artificial Sequence
  source: /note="Description of Artificial Sequence: Synthetic polypeptide"
DIQMTQSPSSLSASVGDRVTITCRASQDIFNYLNWYQQKPGKAVKLLIYYTSRLETGVPSRFSGSGSGTDYTLTISSLQPEDFATYFCQQGDTLPWTFGQGTKLEIK

SEQ ID NO: 704 - protein, 107 aa, Artificial Sequence
  source: /note="Description of Artificial Sequence: Synthetic polypeptide"
DIQMTQSPSSLSASVGDRVTITCRASQDIFNYLNWYQQKPGKAVKLLIYYTSSLETGVPSRFSGSGSGTDYTLTISSLQPEDFATYFCQQGDTLPWTFGQGTKLEIK

SEQ ID NO: 705 - protein, 107 aa, Artificial Sequence
  source: /note="Description of Artificial Sequence: Synthetic polypeptide"
DIQMTQSPSSLSASVGDRVTITCRASQDIFNYLNWYQQKPGKAVKLLIYYTSRLETGVPSRFSGSGSGTDYTLTISSLQPEDFATYFCQQGDELPWTFGQGTKLEIK

SEQ ID NO: 706 - protein, 107 aa, Artificial Sequence
  source: /note="Description of Artificial Sequence: Synthetic polypeptide"
DIQMTQSPSSLSASVGDRVTITCRASQDIYNYLNWYQQKPGKAVKLLIYYTSMLETGVPSRFSGSGSGTDYTLTISSLQPEDFATYFCQQGDTLPWTFGQGTKLEIK

SEQ ID NO: 707 - protein, 107 aa, Artificial Sequence
  source: /note="Description of Artificial Sequence: Synthetic polypeptide"
DIQMTQSPSSLSASVGDRVTITCRASQDIANYLNWYQQKPGKAVKLLIYYTSILETGVPSRFSGSGSGTDYTLTISSLQPEDFATYFCQQGDTLPWTFGQGTKLEIK

SEQ ID NO: 708 - protein, 107 aa, Artificial Sequence
  source: /note="Description of Artificial Sequence: Synthetic polypeptide"
DIQMTQSPSSLSASVGDRVTITCRASQDIYHYLNWYQQKPGKAVKLLIYYTSRLETGVPSRFSGSGSGTDYTLTISSLQPEDFATYFCQQGDTLPWTFGQGTKLEIK

SEQ ID NO: 709 - protein, 107 aa, Artificial Sequence
  source: /note="Description of Artificial Sequence: Synthetic polypeptide"
DIQMTQSPSSLSASVGDRVTITCRASQDIANYLNWYQQKPGKAVKLLIYYTSMLETGVPSRFSGSGSGTDYTLTISSLQPEDFATYFCQQGDTLPWTFGQGTKLEIK

SEQ ID NO: 710 - protein, 107 aa, Artificial Sequence
  source: /note="Description of Artificial Sequence: Synthetic polypeptide"
DIQMTQSPSSLSASVGDRVTITCRASQDIYNYLNWYQQKPGKAVKLLIYYSSMLETGVPSRFSGSGSGTDYTLTISSLQPEDFATYFCQQGDELPWTFGQGTKLEIK

SEQ ID NO: 711 - protein, 107 aa, Artificial Sequence
  source: /note="Description of Artificial Sequence: Synthetic polypeptide"
DIQMTQSPSSLSASVGDRVTITCRASQDIYNYLNWYQQKPGKAVKLLIYYTSRLETGVPSRFSGSGSGTDYTLTISSLQPEDFATYFCQQGDIIPWTFGQGTKLEIK

SEQ ID NO: 712 - protein, 118 aa, Artificial Sequence
  source: /note="Description of Artificial Sequence: Synthetic polypeptide"
EVQLVQSEAEVKKPGASVKVSCKASGYTFTSYQLQWVRQAPGQGLEWMGRIDPHGGSTNYAQKFQGRATLTVDTSTSTAYMELSRLRSDDTAVYYCARWDYGGYFDVWGQGTLVTVSS

SEQ ID NO: 713 - protein, 118 aa, Artificial Sequence
  source: /note="Description of Artificial Sequence: Synthetic polypeptide"
EVQLVQSGAEVKKPGASVKVSCKASGYTFTSYDMCWVRQAPGQGLEWMGRIDPQSGGIRYAQKFQGRATLTVDTSTSTAYMELSRLRSDDTAVYYCARWDFGGYFDVWGQGTLVTVSS

SEQ ID NO: 714 - protein, 118 aa, Artificial Sequence
  source: /note="Description of Artificial Sequence: Synthetic polypeptide"
EVQLVQSGAEVKKPGASVKVSCKASGYTFTSYWMQWVRQAPGQGLEWMGRIDPQSGGIKYAQKFQGRATLTVDTSTSTAYMELSRLRSDDTAVYYCARWDYGGYFDVWGQGTLVTVSS

SEQ ID NO: 715 - protein, 118 aa, Artificial Sequence
  source: /note="Description of Artificial Sequence: Synthetic polypeptide"
EVQLVQSGAEVKKPGASVKVSCKASGYTFTSYLMHWVRQAPGQGLEWMGRIDPRNGGIPYAQKFQGRATLTVDTSTSTAYMELSRLRSDDTAVYYCARWDYGGYFDVWGQGTLVTVSS

SEQ ID NO: 716 - protein, 118 aa, Artificial Sequence
  source: /note="Description of Artificial Sequence: Synthetic polypeptide"
EVQLVQSGAEVKKPGASVKVSCKASGYTFTSYLLQWVRQAPGQGLEWMGRIDPQSGGNKYAQKFQGRATLTVDTSTSTAYMELSRLRSDDTAVYYCARWDFGGYFDVWGQGTLVTVSS

SEQ ID NO: 717 - protein, 118 aa, Artificial Sequence
  source: /note="Description of Artificial Sequence: Synthetic polypeptide"
EVQLVQSGAEVKKPGASVKVSCKASGYTFTSYLMHWVRQAPGQGLEWMGRIDPQSGGFIYAQKFQGRATLTVDTSTSTAYMELSRLRSDDTAVYYCARYDHGGYFDVWGQGTLVTVSS

SEQ ID NO: 718 - protein, 118 aa, Artificial Sequence
  source: /note="Description of Artificial Sequence: Synthetic polypeptide"
EVQLVQSGAEVKKPGASVKVSCKASGYTFTRYLMNWVRQAPGQGLEWMGRIDPPSGGVKYAQKFQGRATLTVDTSTSTAYMELSRLRSDDTAVYYCARWDYGGYFDVWGQGTLVTVSS

SEQ ID NO: 719 - protein, 118 aa, Artificial Sequence
  source: /note="Description of Artificial Sequence: Synthetic polypeptide"
EVQLVQSGAEVKKPGASVKVSCKASGYTFTSYLLSWVRQAPGQGLEWMGRIDPDSGGIKYAQKFQGRATLTVDTSTSTAYMELSRLRSDDTAVYYCARWDYGGFFDVWGQGTLVTVSS

SEQ ID NO: 720 - protein, 118 aa, Artificial Sequence
  source: /note="Description of Artificial Sequence: Synthetic polypeptide"
EVQLVQSGAEVKKPGASVKVSCKASGYTFTKYLMTWVRQAPGQGLEWMGRIDPQSGGIKYAQKFQGRATLTVDTSTSTAYMELSRLRSDDTAVYYCARWDYGGYFDVWGQGTLVTVSS

SEQ ID NO: 721 - protein, 118 aa, Artificial Sequence
  source: /note="Description of Artificial Sequence: Synthetic polypeptide"
EVQLVQSGAEVKKPGASVKVSCKASGYTFTIYDMHWVRQAPGQGLEWMGRIDPQLGGIKYAQKFQGRATLTVDTSTSTAYMELSRLRSDDTAVYYCARWQWGGEFDVWGQGTLVTVSS

SEQ ID NO: 722 - protein, 118 aa, Artificial Sequence
  source: /note="Description of Artificial Sequence: Synthetic polypeptide"
EVQLVQSGAEVKKPGASVKVSCKASGYTFTSYLMHWVRQAPGQGLEWMGRIDPQSGGIIYAQKFQGRATLTVDTSTSTAYMELSRLRSDDTAVYYCARWHFGGYFDVWGQGTLVTVSS

SEQ ID NO: 723 - protein, 118 aa, Artificial Sequence
  source: /note="Description of Artificial Sequence: Synthetic polypeptide"
EVQLVQSGAEVKKPGASVKVSCKASGYTFTQYLMSWVRQAPGQGLEWMGRIDPQSGGIKYAQKFQGRATLTVDTSTSTAYMELSRLRSDDTAVYYCARWDYGGYFDVWGQGTLVTVSS

SEQ ID NO: 724 - protein, 118 aa, Artificial Sequence
  source: /note="Description of Artificial Sequence: Synthetic polypeptide"
EVQLVQSGAEVKKPGASVKVSCKASGYTFTRYLLQWVRQAPGQGLEWMGRIDPQGGGIKYAQKFQGRATLTVDTSTSTAYMELSRLRSDDTAVYYCARWDYGGYFDVWGQGTLVTVSS

SEQ ID NO: 725 - protein, 118 aa, Artificial Sequence
  source: /note="Description of Artificial Sequence: Synthetic polypeptide"
EVQLVQSGAEVKKPGASVKVSCKASGYTFTSYWMHWVRQAPGQGLEWMGRIDPVGGGTKYAQKFQGRATLTVDTSTSTAYMELSRLRSDDTAVYYCARWNYGGYFDVWGQGTLVTVSS

SEQ ID NO: 726 - protein, 118 aa, Artificial Sequence
  source: /note="Description of Artificial Sequence: Synthetic polypeptide"
EVQLVQSGAEVKKPGASVKVSCKASGYTFTRYWMSWVRQAPGQGLEWMGRIDPQSGGIIYAQKFQGRATLTVDTSTSTAYMELSRLRSDDTAVYYCARWDWGGYFDVWGQGTLVTVSS

SEQ ID NO: 727 - protein, 118 aa, Artificial Sequence
  source: /note="Description of Artificial Sequence: Synthetic polypeptide"
EVQLVQSGAEVKKPGASVKVSCKASGYTFTSYLMQWVRQAPGQGLEWMGRIDPRSGGILYAQKFQGRATLTVDTSTSTAYMELSRLRSDDTAVYYCARWNYGGYFDVWGQGTLVTVSS

SEQ ID NO: 728 - protein, 118 aa, Artificial Sequence
  source: /note="Description of Artificial Sequence: Synthetic polypeptide"
EVQLVQSGAEVKKPGASVKVSCKASGYTFTSYLNHWVRQAPGQGLEWMGRIDPESGGSRYAQKFQGRATLTVDTSTSTAYMELSRLRSDDTAVYYCARWDHGGYFDVWGQGTLVTVSS

SEQ ID NO: 729 - protein, 118 aa, Artificial Sequence
  source: /note="Description of Artificial Sequence: Synthetic polypeptide"
EVQLVQSGAEVKKPGASVKVSCKASGYTFTSYLMQWVRQAPGQGLEWMGRIDPRDGGINYAQKFQGRATLTVDTSTSTAYMELSRLRSDDTAVYYCARWDYGGYFDVWGQGTLVTVSS

SEQ ID NO: 730 - protein, 118 aa, Artificial Sequence
  source: /note="Description of Artificial Sequence: Synthetic polypeptide"
EVQLVQSGAEVKKPGASVKVSCKASGYTFTRYWMQWVRQAPGQGLEWMGRIDPLSGGMKYAQKFQGRATLTVDTSTSTAYMELSRLRSDDTAVYYCARWNHGGYFDVWGQGTLVTVSS

SEQ ID NO: 731 - protein, 118 aa, Artificial Sequence; identical to SEQ ID NO: 586
  source: /note="Description of Artificial Sequence: Synthetic polypeptide"

SEQ ID NO: 732 - protein, 118 aa, Artificial Sequence
  source: /note="Description of Artificial Sequence: Synthetic polypeptide"
EVQLVQSGAEVKKPGASVKVSCKASGYTFTNYLLHWVRQAPGQGLEWMGRIDPQSGDIKYAQKFQGRATLTVDTSTSTAYMELSRLRSDDTAVYYCARWDWGGYFDVWGQGTLVTVSS

SEQ ID NO: 733 - protein, 118 aa, Artificial Sequence
  source: /note="Description of Artificial Sequence: Synthetic polypeptide"
EVQLVQSGAEVKKPGASVKVSCKASGYTFTSYWMHWVRQAPGQGLEWMGRIDPKNGGIIYAQKFQGRATLTVDTSTSTAYMELSRLRSDDTAVYYCARWDWGGFFDVWGQGTLVTVSS

SEQ ID NO: 734 - protein, 118 aa, Artificial Sequence
  source: /note="Description of Artificial Sequence: Synthetic polypeptide"
EVQLVQSGAEVKKPGASVKVSCKASGYTFTSYDTNWVRQAPGQGLEWMGRIDPQNGGIKYAQKFQGRATLTVDTSTSTAYMELSRLRSDDTAVYYCARWDYGGYFDVWGQGTLVTVSS

SEQ ID NO: 735 - protein, 118 aa, Artificial Sequence
  source: /note="Description of Artificial Sequence: Synthetic polypeptide"
EVQLVQSGAEVKKPGASVKVSCKASGYTFTGYLVSWVRQAPGQGLEWMGRIDPRSGGIIYAQKFQGRATLTVDTSTSTAYMELSRLRSDDTAVYYCARWDYGGYFDVWGQGTLVTVSS

SEQ ID NO: 736 - protein, 118 aa, Artificial Sequence
  source: /note="Description of Artificial Sequence: Synthetic polypeptide"
EVQLVQSGAEVKKPGASVKVSCKASGYTFTNYLMQWVRQAPGQGLEWMGRIDPQIGGSRYAQKFQGRATLTVDTSTSTAYMELSRLRSDDTAVYYCARWDYGGYFDVWGQGTLVTVSS

SEQ ID NO: 737 - protein, 118 aa, Artificial Sequence
  source: /note="Description of Artificial Sequence: Synthetic polypeptide"
EVQLVQSGAEVKKPGASVKVSCKASGYTFTRYDLQWVRQAPGQGLEWMGRIDPPSGGINYAQKFQGRATLTVDTSTSTAYMELSRLRSDDTAVYYCARWDYGGYFDVWGQGTLVTVSS

SEQ ID NO: 738 - protein, 118 aa, Artificial Sequence
  source: /note="Description of Artificial Sequence: Synthetic polypeptide"
EVQLVQSGAEVKKPGASVKVSCKASGYTFTRYDMHWVRQAPGQGLEWMGRIDPSTGGIKYAQKFQGRATLTVDTSTSTAYMELSRLRSDDTAVYYCARWDYGGYFDVWGQGTLVTVSS

SEQ ID NO: 739 - protein, 118 aa, Artificial Sequence
  source: /note="Description of Artificial Sequence: Synthetic polypeptide"
EVQLVQSGAEVKKPGASVKVSCKASGYTFTSYWMHWVRQAPGQGLEWMGRIDPLSGDVKYAQKFQGRATLTVDTSTSTAYMELSRLRSDDTAVYYCARWDYGGYFDVWGHGTLVTVSS

SEQ ID NO: 740 - protein, 118 aa, Artificial Sequence
  source: /note="Description of Artificial Sequence: Synthetic polypeptide"
EVQLVQSGAEVKKPGASVKVSCKASGYTFTSYLISWVRQAPGQGLEWMGRIDPQSGGVKYAQKFQGRATLTVDTSTSTAYMELSRLRSDDTAVYYCARWDYGGYFDVWGQGTLVTVSS

SEQ ID NO: 741 - protein, 118 aa, Artificial Sequence
  source: /note="Description of Artificial Sequence: Synthetic polypeptide"
EVQLVQSGAEVKKPGASVKVSCKASGYTFTSYWLQWVRQAPGQGLEWMGRIDPESGGIKYAQKFQGRATLTVDTSTSTAYMELSRLRSDDTAVYYCARWDYGGYFDVWGQGTLVTVSS

SEQ ID NO: 742 - protein, 118 aa, Artificial Sequence
  source: /note="Description of Artificial Sequence: Synthetic polypeptide"
EVQLVQSGAEVKKPGASVKVSCKASGYTFTSYLVNWVRQAPGQGLEWMGRIDPQSGGIKYAQKFQGRATLTVDTSTSTAYMELSRLRSDDTAVYYCARWDYGGYFDVWGQGTLVTVSS

SEQ ID NO: 743 - protein, 118 aa, Artificial Sequence
  source: /note="Description of Artificial Sequence: Synthetic polypeptide"
EVQLVQSGAEVKKPGASVKVSCKASGYTFTNYLMQWVRQAPGQGLEWMGRIDPYRGGSIYAQKFQGRATLTVDTSTSTAYMELSRLRSDDTAVYYCARWDYGGYFDVWGQGTLVTVSS

SEQ ID NO: 744 - protein, 118 aa, Artificial Sequence
  source: /note="Description of Artificial Sequence: Synthetic polypeptide"
EVQLVQSGAEVKKPGASVKVSCKASGYTFTRYFMTWVRQAPGQGLEWMGRIDPQGGGIKYAQKFQGRATLTVDTSTSTAYMELSRLRSDDTAVYYCARWDYGGYFDVWGQGTLVTVSS

SEQ ID NO: 745 - protein, 118 aa, Artificial Sequence
  source: /note="Description of Artificial Sequence: Synthetic polypeptide"
EVQLVQSGAEVKKPGASVKVSCKASGYTFTSYLLTWVRQAPGQGLEWMGRIDPESGGRKYAQKFQGRATLTVDTSTSTAYMELSRLRSDDTAVYYCARWDYGGFFDVWGQGTLVTVSS

SEQ ID NO: 746 - protein, 118 aa, Artificial Sequence
  source: /note="Description of Artificial Sequence: Synthetic polypeptide"
EVQLVQSGAEVKKPGASVKVSCKASGYTFTSYDMHWVRQAPGQGLEWMGRIDPQSGGFKYAQKFQGRATLTVDTSTSTAYMELSRLRSDDTAVYYCARWDYGGYFDVWGQGTLVTVSS

SEQ ID NO: 747 - protein, 118 aa, Artificial Sequence
  source: /note="Description of Artificial Sequence: Synthetic polypeptide"
EVQLVQSGAEVKKPGASVKVSCKASGYTFTNYLLQWVRQAPGQGLEWMGRIDPESGGIKYAQKFQGRATLTVDTSTSTAYMELSRLRSDDTAVYYCARWDYGGYFDVWGQGTLVTVSS

SEQ ID NO: 748 - protein, 118 aa, Artificial Sequence
  source: /note="Description of Artificial Sequence: Synthetic polypeptide"
EVQLVQSGAEVKKPGASVKVSCKASGYTFTRYYLNWVRQAPGQGLEWMGRIDPQSGGIKYAQKFQGRATLTVDTSTSTAYMELSRLRSDDTAVYYCARWDYGGYFDVWGQGTLVTVSS

SEQ ID NO: 749 - protein, 118 aa, Artificial Sequence
  source: /note="Description of Artificial Sequence: Synthetic polypeptide"
EVQLVQSGAEVKKPGASVKVSCKASGYTFTSYLMHWVRQAPGQGLEWMGRIDPQNGGIKYAQKFQGRATLTVDTSTSTAYMELSRLRSDDTAVYYCARWDYGGYFDVWGQGTLVTVSS

SEQ ID NO: 750 - protein, 118 aa, Artificial Sequence
  source: /note="Description of Artificial Sequence: Synthetic polypeptide"
EVQLGQSGAEVKKPGASVKVSCKASGYTFTSYLMTWVRQAPGQGLEWMGRIDPLSGGIKYAQKFQGRATLTVDTSTSTAYMELSRLRSDDTAVYYCARWDYGGYFDVWGQGTLVTVSS

SEQ ID NO: 751 - protein, 118 aa, Artificial Sequence
  source: /note="Description of Artificial Sequence: Synthetic polypeptide"
EVQLVQSGAEVKKPGASVKVSCKASGYTFTRYLLQWVRQAPGQGLEWMGRIDPDSGAIKYAQKFQGRAALTVDTSTSTAYMELSRLRSDDTAVYYCARWDYGGYFDVWGQGTLVTVSS

SEQ ID NO: 752 - protein, 118 aa, Artificial Sequence
  source: /note="Description of Artificial Sequence: Synthetic polypeptide"
EVQLVQSGAEVKKPGASVKVSCKASGYTFTSYLMQWVRQAPGQGLEWMGRIDPQSGGVKYAQKFQGRATLTVDTSTSTAYMELSRLRSDDTAVYYCARWDWGGYFDVWGQGTLVTVSS

SEQ ID NO: 753 - protein, 118 aa, Artificial Sequence
  source: /note="Description of Artificial Sequence: Synthetic polypeptide"
EVQLVQSGAEVKKPGASVKVSCKASGYTFTSYLIQWVRQAPGQGLEWMGRIDPQSGGIKYAQKFQGRATLTVDTSTSTAYMELSRLRSDDTAVYYCARWDYGGYFDVWGQGTLVTVSS

SEQ ID NO: 754 - protein, 118 aa, Artificial Sequence
  source: /note="Description of Artificial Sequence: Synthetic polypeptide"
EVQLVQSGAEVKKPGASVKVSCKASGYTFTSYWMQWVRQAPGQGLEWMGRIDPESGGVKYAQKFQGRATLTVDTSTSTAYMELSRLRSDDTAVYYCARWDWGGFFDVWGQGTLVTVSS

SEQ ID NO: 755 - protein, 118 aa, Artificial Sequence
  source: /note="Description of Artificial Sequence: Synthetic polypeptide"
EVQLVQSGAEVKKPGASVKVSCKASGYTFTRYLMNWVRQAPGQGLEWMGRIDPQSGEGKYAQKFQGRATLTVDTSTSTAYMELSRLRSDDTAVYYCARWDYGGYFDVWGQGTLVTVSS

SEQ ID NO: 756 - protein, 118 aa, Artificial Sequence
  source: /note="Description of Artificial Sequence: Synthetic polypeptide"
EVQLVQSGAEVKKPGASVKVSCKASGYTFTSYWMNWVRQAPGQGLEWMGRIDPQNGGIKYAQKFQGRATLTVDTSTSTAYMELSRLRSDDTAVYYCARWDYGGYFDVWGQGTLVTVSS

SEQ ID NO: 757 - protein, 107 aa, Artificial Sequence
  source: /note="Description of Artificial Sequence: Synthetic polypeptide"
DIQMTQSPSSLSASVGDRVTITCRASQDIYNYLNWYQQKPGKAVKLLIYYTSSLETGVPSRFSGSGSGTDYTLTISSLQPEDFATYFCQQGDTLPWTFGQGTKLEIK

SEQ ID NO: 758 - protein, 107 aa, Artificial Sequence
  source: /note="Description of Artificial Sequence: Synthetic polypeptide"
DIQMTQSPSSLSASVGDRVTITCRASQDIYGYLNWYQQKPGKAVKLLIYYTSRLETGVPSRFSGSGSGTDYTLTISSLQPEDFATYFCQQGDTLPWTFGQGTKLEIK

SEQ ID NO: 759 - protein, 107 aa, Artificial Sequence
  source: /note="Description of Artificial Sequence: Synthetic polypeptide"
DIQMTQSPSSLSASVGDRVTITCRASQDIYHYLNWYQQKPGKAVKLLIYYTSRLHSGVPSRFSGSGSGTDYTLTISSLQPEDFATYFCQQGDSLPWTFGQGTKLEIK

SEQ ID NO: 760 - protein, 107 aa, Artificial Sequence
  source: /note="Description of Artificial Sequence: Synthetic polypeptide"
DIQMTQSPSSLSASVGDRVTITCRASQDIYNYLNWYQQKPGKAVKLLIYYTSSLETGVPSRFSGSGSGTDYTLTISSLQPEDFATYFCQQGDSMPWTFGQGTKLEIK

SEQ ID NO: 761 - protein, 107 aa, Artificial Sequence
  source: /note="Description of Artificial Sequence: Synthetic polypeptide"
DIQMTQSPSSLSASVGDRVTITCRASQDIANYLNWYQQKPGKAVKLLIYYASGLETGVPSRFSGSGSGTDYTLTISSLQPEDFATYFCQQGDDLPWTFGQGTKLEIK

SEQ ID NO: 762 - protein, 107 aa, Artificial Sequence; identical to SEQ ID NO: 694
  source: /note="Description of Artificial Sequence: Synthetic polypeptide"

SEQ ID NO: 763 - protein, 107 aa, Artificial Sequence; identical to SEQ ID NO: 709
  source: /note="Description of Artificial Sequence: Synthetic polypeptide"

SEQ ID NO: 764 - protein, 107 aa, Artificial Sequence
  source: /note="Description of Artificial Sequence: Synthetic polypeptide"
DIQMTQSPSSLSASVGDRVTITCRASQDIYSYLNWYQQKPGKAVKLLIYYTSMLETGVPSRFSGSGSGTDYTLTISSLQPEDFATYFCQQGDTLPWTFGQGTKLEIK

SEQ ID NO: 765 - protein, 107 aa, Artificial Sequence
  source: /note="Description of Artificial Sequence: Synthetic polypeptide"
DIQMTQSPSSLSASVGDRVTITCRASQDIFSYLNWYQQKPGKAVKLLIYYTSRLETGVPSRFSGSGSGTDYTLTISSLQPEDFATYFCQQGDTLPWTFGQGTKLEIK

SEQ ID NO: 766 - protein, 107 aa, Artificial Sequence
  source: /note="Description of Artificial Sequence: Synthetic polypeptide"
DIQMTQSPSSLSASVGDRVTITCRASQDIFNYLNWYQQKPGKAVKLLIYYTSMLETGVPSRFSGSGSGTDYTLTISSLQPEDFATYFCQQGDAPPWTFGQGTKLEIK

SEQ ID NO: 767 - protein, 107 aa, Artificial Sequence
  source: /note="Description of Artificial Sequence: Synthetic polypeptide"
DIQMTQSPSSLSASVGDRVTITCRASQDIYNYLNWYQQKPGKAVKLLIYYTSRLETGVPSRFSGSGSGTDYTLTISSLQPEDFATYFCQQGDALPWTFGQGTKLEIK

SEQ ID NO: 768 - protein, 107 aa, Artificial Sequence
  source: /note="Description of Artificial Sequence: Synthetic polypeptide"
DIQMTQSPSSLSASVGDRVTITCRASQDITNYLNWYQQKPGKAVKLLIYYTSGLETGVPSRFSGSGSGTDYTLTISSLQPEDFATYFCQQGDILPWTFGQGTKLEIK

SEQ ID NO: 769 - protein, 107 aa, Artificial Sequence
  source: /note="Description of Artificial Sequence: Synthetic polypeptide"
DIQMTQSPSSLSASVGDRVTITCRASQDITNYLNWYQQKPGKAVKLLIYYTSGLETGVPSRFSGSGSGTDYTLTISSLQPEDFATYFCQQGDALPWTFGQGTKLEIK

SEQ ID NO: 770 - protein, 107 aa, Artificial Sequence
  source: /note="Description of Artificial Sequence: Synthetic polypeptide"
DIQMTQSPSSLSASVGDRVTITCRASQDIYNYLNWYQQKPGKAVKLLIYYTSRLETGVPSRFSGSGSGTDYTLTISSLQPEDFATYFCQQGDSLPWTFGQGTKLEIK

SEQ ID NO: 771 - protein, 107 aa, Artificial Sequence
  source: /note="Description of Artificial Sequence: Synthetic polypeptide"
DIQMTQSPSSLSASVGDRVTITCRASQDIFKYLNWYQQKPGKAVKLLIYYTSRLETGVPSRFSGSGSGTDYTLTISSLQPEDFATYFCQQGDTLPWTFGQGTKLEIK

SEQ ID NO: 772 - protein, 107 aa, Artificial Sequence
  source: /note="Description of Artificial Sequence: Synthetic polypeptide"
DIQMTQSPSSLSASVGDRVTITCRASQDITNYLNWYQQKPGKAVKLLIYYSSRLETGVPSRFSGSGSGTDYTLTISSLQPEDFATYFCQQGDTLPWTFGQGTKLEIK

SEQ ID NO: 773 - protein, 107 aa, Artificial Sequence
  source: /note="Description of Artificial Sequence: Synthetic polypeptide"
DIQMTQSPSSLSASVGDRVTITCRASQDIYNYLNWYQQKPGKAVKLLIYYSSRLETGVPSRFSGSGSGTDYTLTISSLQPEDFATYFCQQGDTLPWTFGQGTKLEIK

SEQ ID NO: 774 - protein, 107 aa, Artificial Sequence
  source: /note="Description of Artificial Sequence: Synthetic polypeptide"
DIQMTQSPSSLSASVGDRVTITCRASQDITNYLNWYQQKPGKAVKLLIYYTSELETGVPSRFSGSGSGTDYTLTISSLQPEDFATYFCQQGDALPWTFGQGTKLEIK

SEQ ID NO: 775 - protein, 107 aa, Artificial Sequence
  source: /note="Description of Artificial Sequence: Synthetic polypeptide"
DIQMTQSPSSLSASVGDRVTITCRASQDISYYLNWYQQKPGKAVKLLIYYSSLLETGVPSRFSGSGSGTDYTLTISSLQPEDFATYFCQQGDTLPWTFGQGTKLEIK

SEQ ID NO: 776 - protein, 107 aa, Artificial Sequence
  source: /note="Description of Artificial Sequence: Synthetic polypeptide"
DIQMTQSPSSLSASVGDRVTITCRASQDIANYLNWYQQKPGKAVKLLIYYTSRLETGVPSRFSGSGSGTDYTLTISSLQPEDFATYFCQQGDTLPWTFGQGTKLEIK

SEQ ID NO: 777 - protein, 107 aa, Artificial Sequence
  source: /note="Description of Artificial Sequence: Synthetic polypeptide"
DIQMTQSPSSLSASVGDRVTITCRASQDIFNYLNWYQQKPGKAVKLLIYYTSRLETGVPSRFSGSGSGTDYTLTISSLQPEDFATYFCQQGDILPWTFGQGTKLEIK

SEQ ID NO: 778 - protein, 107 aa, Artificial Sequence
  source: /note="Description of Artificial Sequence: Synthetic polypeptide"
DIQMTQSPSSLSASVGDRVTITCRASQDITNYLNWYQQKPGKAVKLLIYYASMLETGVPSRFSGSGSGTDYTLTISSLQPEDFATYFCQQGDTVPWTFGQGTKLEIK

SEQ ID NO: 779 - protein, 107 aa, Artificial Sequence
  source: /note="Description of Artificial Sequence: Synthetic polypeptide"
DIQMTQSPSSLSASVGDRVTITCRASQDIYNYLNWYQQKPGKAVKLLIYYSSRLHSGVPSRFSGSGSGTDYTLTISSLQPEDFATYFCQQGDTLPWTFGQGTKLEIK

SEQ ID NO: 780 - protein, 107 aa, Artificial Sequence
  source: /note="Description of Artificial Sequence: Synthetic polypeptide"
DIQMTQSPSSLSASVGDRVTITCRASQDIYNYLNWYQQKPGKAVKLLIYYASRLETGVPSRFSGSGSGTDYTLTISSLQPEDFATYFCQQGDSLPWTFGQGTKLEIK

SEQ ID NO: 781 - protein, 107 aa, Artificial Sequence
  source: /note="Description of Artificial Sequence: Synthetic polypeptide"
DIQMTQSPSSLSASVGDRVTITCRASQDIFNYLNWYQQKPGKAVKLLIYYTSRLHSGVPSRFSGSGSGTDYTLTISSLQPEDFATYFCQQGDTLPWTFGQGTKLEIK

SEQ ID NO: 782 - protein, 107 aa, Artificial Sequence
  source: /note="Description of Artificial Sequence: Synthetic polypeptide"
DIQMTQSPSSLSASVGDRVTITCRASQDIYYYLNWYQQKPGKAVKLLIYYTSRLETGVPSRFSGSGSGTDYTLTISSLQPEDFATYFCQQGDTLPWTFGQGTKLEIK

SEQ ID NO: 783 - protein, 107 aa, Artificial Sequence
  source: /note="Description of Artificial Sequence: Synthetic polypeptide"
DIQMTQSPSSLSASVGDRVTITCRASQDIFNYLNWYQQKPGKAVKLLIYYTSRLHSGVPSRFSGSGSGTDYTLTISSLQPEDFATYFCQQGDTVPWTFGQGTKLEIK

SEQ ID NO: 784 - protein, 107 aa, Artificial Sequence
  source: /note="Description of Artificial Sequence: Synthetic polypeptide"
DIQMTQSPSSLSASVGDRVTITCRASQDITNYLNWYQQKPGKAVKLLIYYTSSLETGVPSRFSGSGSGTDYTLTISSLQPEDFATYFCQQGDTLPWTFGQGTKLEIK

SEQ ID NO: 785 - protein, 107 aa, Artificial Sequence
  source: /note="Description of Artificial Sequence: Synthetic polypeptide"
DIQMTQSPSSLSASVGDRVTITCRASQDIFNYLNWYQQKPGKAVKLLIYYTSRLETGVPSRFSGSGSGTDYTLTISSLQPEDFATYFCQQGDYLPWTFGQGTKLEIK

SEQ ID NO: 786 - protein, 107 aa, Artificial Sequence
  source: /note="Description of Artificial Sequence: Synthetic polypeptide"
DIQMTQSPSSLSASVGDRVTITCRASQDIANYLNWYQQKPGKAVKLLIYYTSELETGVPSRFSGSGSGTDYTLTISSLQPEDFATYFCQQGDSLPWTFGQGTKLEIK

SEQ ID NO: 787 - protein, 107 aa, Artificial Sequence; identical to SEQ ID NO: 703
  source: /note="Description of Artificial Sequence: Synthetic polypeptide"

SEQ ID NO: 788 - protein, 107 aa, Artificial Sequence; identical to SEQ ID NO: 333
  source: /note="Description of Artificial Sequence: Synthetic polypeptide"

SEQ ID NO: 789 - protein, 107 aa, Artificial Sequence; identical to SEQ ID NO: 687
  source: /note="Description of Artificial Sequence: Synthetic polypeptide"

SEQ ID NO: 790 - protein, 107 aa, Artificial Sequence
  source: /note="Description of Artificial Sequence: Synthetic polypeptide"
DIQMTQSPSSLSASVGDRVTITCRASQDIYNYLNWYQQKPGKAVKLLIYYTSRLETGVPSRFSGSGSGTDYTLTISSLQPEDFATYFCQQGDGLPWTFGQGTKLEIK

SEQ ID NO: 791 - protein, 107 aa, Artificial Sequence
  source: /note="Description of Artificial Sequence: Synthetic polypeptide"
DIQMTQSPSSLSASVGDRVTITCRASQDISNYLNWYQQKPGKAVKLLIYYTSGLETGVPSRFSGSGSGTDYTLTISSLQPEDFATYFCQQGDTLPWTFGQGTKLEIK

SEQ ID NO: 792 - protein, 107 aa, Artificial Sequence
  source: /note="Description of Artificial Sequence: Synthetic polypeptide"
DIQMTQSPSSLSASVGDRVTITCRASQDIYNYLNWYQQKPGKAVKLLIYYTSRLETGVPSRFSGSGSGTDYTLTISSLQPEDFATYFCQQGDTVPWTFGQGTKLEIK

SEQ ID NO: 793 - protein, 107 aa, Artificial Sequence
  source: /note="Description of Artificial Sequence: Synthetic polypeptide"
DIQMTQSPSSLSASVGDRVTITCRASQDIYNYLNWYQQKPGKAVKLLIYYTSNLETGVPSRFSGSGSGTDYTLTISSLQPEDFATYFCQQGDTLPWTFGQGTKLEIK

SEQ ID NO: 794 - protein, 118 aa, Artificial Sequence
  source: /note="Description of Artificial Sequence: Synthetic polypeptide"
EVQLVQSGAEVKKPGASVKVSCKASGYTFTRYWMHWVRQAPGQGLEWMGRIDPPSGEIKYAQKFQGRATLTVDTSTSTAYMELSRLRSDDTAVYYCARWDYGGYFDVWGQGTLVTVSS

SEQ ID NO: 795 - protein, 118 aa, Artificial Sequence
  source: /note="Description of Artificial Sequence: Synthetic polypeptide"
EVQLVQSGAEVKKPGASVKVSCKASGYTFTRYLMQWVRQAPGQGLEWMGRIDPDSGGSRYAQKFQGRATLTVDTSTSTAYMELSRLRSDDTAVYYCARWDYGGYFDVWGQGTLVTVSS

SEQ ID NO: 796 - protein, 118 aa, Artificial Sequence
  source: /note="Description of Artificial Sequence: Synthetic polypeptide"
EVQLVQSGAEVKKPGASVKVSCKASGYTFTRYWMSWVRQAPGQGLEWMGRIDPQSGSFKYAQKFQGRATLTVDTSTSTAYMELSRLRSDDTAVYYCARWDYGGYFDVWGQGTLVTVSS

SEQ ID NO: 797 - protein, 118 aa, Artificial Sequence
  source: /note="Description of Artificial Sequence: Synthetic polypeptide"
EVQLVQSGAEVKKPGASVKVSCKASGYTFTSYLMQWVRQAPGQGLEWMGRIDPQSGGIRYAQKFQGRATLTVDTSTSTAYMELSRLRSDDTAVYYCARWDYGGYFDVWGQGTLVTVSS

SEQ ID NO: 798 - protein, 118 aa, Artificial Sequence
  source: /note="Description of Artificial Sequence: Synthetic polypeptide"
EVQLVQSGAEVKKPGASVKVSCKASGYTFTTYLMQWVRQAPGQGLEWMGRIDPQSGGFIYAQKFQGRATLTVDTSTSTAYMELSRLRSDDTAVYYCARWDYGGYFDVWGQGTLVTVSS

SEQ ID NO: 799 - protein, 118 aa, Artificial Sequence
  source: /note="Description of Artificial Sequence: Synthetic polypeptide"
EVQLVQSGAEVKKPGASVKVSCKASGYTFTSYLVQWVRQAPGQGLEWMGRIDPESGGSRYAQKFQGRATLTVDTSTSTAYMELSRLRSDDTAVYYCARWDYGGYFDVWGQGTLVTVSS

SEQ ID NO: 800 - protein, 118 aa, Artificial Sequence
  source: /note="Description of Artificial Sequence: Synthetic polypeptide"
EVQLVQSGAEVKKPGASVKVSCKASGYTFTNYYMNWVRQAPGQGLEWMGRIDPQSGGIIYAQKFQGRATLTVDTSTSTAYMELSRLRSDDTAVYYCARWNHGGYFDVWGQGTLVTVSS

SEQ ID NO: 801 - protein, 118 aa, Artificial Sequence
  source: /note="Description of Artificial Sequence: Synthetic polypeptide"
EVQLVQSGAEVKKPGASVKVSCKASGYTFTRYWMQWVRQAPGQGLEWMGRIDPQNGVSKYAQKFQGRATLTVDTSTSTAYMELSRLRSDDTAVYYCARWDYGGYFDVWGQGTLVTVSS

SEQ ID NO: 802 - protein, 118 aa, Artificial Sequence
  source: /note="Description of Artificial Sequence: Synthetic polypeptide"
EVQLVQSGAEVKKPGASVKVSCKASGYTFTSYLMNWVRQAPGQGLEWMGRIDPQSGGTKYAQKFQGRATLTVDTSTSTAYMELSRLRSDDTAVYYCARWDYGGYFDVWGQGTLVTVSS

SEQ ID NO: 803 - protein, 118 aa, Artificial Sequence
  source: /note="Description of Artificial Sequence: Synthetic polypeptide"
EVQLVQSGAEVKKPGASVKVSCKASGYTFTSYDMHWVRQAPGQGLEWMGRIDLQGGVNRYAQKFQGRATLTVDTSTSTAYMELSRLRSDDTAVYYCARWDYGGYFDVWGQGTLVTVSS

SEQ ID NO: 804 - protein, 118 aa, Artificial Sequence
  source: /note="Description of Artificial Sequence: Synthetic polypeptide"
EVQLVQSGAEVKKPGASVKVSCKASGYTFTTYSMQWVRQAPGQGLEWMGRIDPQSGGIKYAQKFQGRATLTVDTSTSTAYMELSRLRSDDTAVYYCARWDYGGYFDVWGQGTLVTVSS

SEQ ID NO: 805 - protein, 118 aa, Artificial Sequence
  source: /note="Description of Artificial Sequence: Synthetic polypeptide"
EVQLVQSGAEVKKPGASVKVSCKASGYTFTSYYMNWVRQAPGQGLEWMGRIDPQEGGGKYAQKFQGRATLTVDTSTSTAYMELSRLRSDDTAVYYCARWDYGGYFDVWGQGTLVTVSS

SEQ ID NO: 806 - protein, 118 aa, Artificial Sequence
  source: /note="Description of Artificial Sequence: Synthetic polypeptide"
EVQLVQSGAEVKKPGASVKVSCKASGYTFTSYLVQWVRQAPGQGLEWMGRIDPVSGGITYAQKFQGRATLTVDTSTSTAYMELSRLRSDDTAVYYCARWDYGGYFDVWGQGTLVTVSS

SEQ ID NO: 807 - protein, 118 aa, Artificial Sequence
  source: /note="Description of Artificial Sequence: Synthetic polypeptide"
EVQLVQSGAEVKKPGASVKVSCKASGYTFTSYLMHWVRQAPGQGLEWMGRIDPESGGIKYAQKFQGRATLTVDTSTSTAYMELSRLRSDDTAVYYCARWDYGGYFDVWGQGTLVTVSS

SEQ ID NO: 808 - protein, 118 aa, Artificial Sequence
  source: /note="Description of Artificial Sequence: Synthetic polypeptide"
EVQLVQSGAEVKKPGASVKVSCKASGYTFTRYLMHWVRQAPGQGLEWMGRIDPQSGGIKYAQKFQGRATLTVDTSTSTAYMELSRLRSDDTAVYYCARWDYGGYFDVWGQGTLVTVSS

SEQ ID NO: 809 - protein, 118 aa, Artificial Sequence
  source: /note="Description of Artificial Sequence: Synthetic polypeptide"
EVQLVQSGAEVKKPGASVKVSCKASGYTFTSYLMQWVRQAPGQGLEWMGRIDPSSGGIGYAQKFQGRATLTVDTSTSTAYMELSRLRSDDTAVYYCARWDFGGYFDVWGQGTLVTVSS

SEQ ID NO: 810 - protein, 118 aa, Artificial Sequence
  source: /note="Description of Artificial Sequence: Synthetic polypeptide"
EVQLVQSGAEVKKPGASVKVSCKASGYTFTSYWMQWVRQAPGQGLEWMGRIDPVSGGVKYAQKFQGRATMTVDTSTSTAYMELSRLRSDDTAVYYCARWDYGGYFDVWGQGTLVTVSS

SEQ ID NO: 811 - protein, 118 aa, Artificial Sequence
  source: /note="Description of Artificial Sequence: Synthetic polypeptide"
EVQLVQSGAEVKKPGASVKVSCKASGYTFTRYLTHWVRQAPGQGLEWMGRIDPQIGGITYAQKFQGRATLTVDTSTSTAYMELSRLRSDDTAVYYCARWDYGGYFDVWGQGTLVTVSS

SEQ ID NO: 812 - protein, 118 aa, Artificial Sequence
  source: /note="Description of Artificial Sequence: Synthetic polypeptide"
EVQLVQSGAEVKKPGASVKVSCKASGYTFTRYWMHWVRQAPGQGLEWMGRIDPTSGGIRYAQKFQGRATLTVDTSTSTAYMELSRLRSDDTAVYYCARWDYGGFFDVWGQGTLVTVSS

SEQ ID NO: 813 - protein, 118 aa, Artificial Sequence
  source: /note="Description of Artificial Sequence: Synthetic polypeptide"
EVQLVQSGAEVKKPGASVKVSCKASGYTFTSYLINWVRQAPGQGLEWMGRIDPQSGGVKYAQKFQGRATLTVDTSTSTAYMELSRLRSDDTAVYYCARWDYGGYFDVWGQGTLVTVSS

SEQ ID NO: 814 - protein, 118 aa, Artificial Sequence
  source: /note="Description of Artificial Sequence: Synthetic polypeptide"
EVQLVQSGAEVKKPGASVKVSCKASGYTFTSYWMQWVRQAPGQGLEWMGRIDPQSGGIKYAQKFQGRATLTVDTSTSTAYMELSRLRSDDTAVYYCARWDWGGYFDVWGQGTLVTVSS

SEQ ID NO: 815 - protein, 118 aa, Artificial Sequence
  source: /note="Description of Artificial Sequence: Synthetic polypeptide"
EVQLVQSGAEVKKPGASVKVSCKASGYTFTRYLMHWVRQAPGQGLEWMGRIDPESGGVIYAQKFQGRATLTVDTSTSTAYMELSRLRSDDTAVYYCARWDYGGYFDVWGQGTLVTVSS

SEQ ID NO: 816 - protein, 118 aa, Artificial Sequence
  source: /note="Description of Artificial Sequence: Synthetic polypeptide"
EVQLVQSGAEVKKPGASVKVSCKASGYTFTGYYMNWVRQAPGQGLEWMGRIDPRSGGFRYAQKFQGRATLTVDTSTSTAYMELSRLRSDDTAVYYCARWDYGGYFDVWGQGTLVTVSS

SEQ ID NO: 817 - protein, 118 aa, Artificial Sequence
  source: /note="Description of Artificial Sequence: Synthetic polypeptide"
EVQLVQSGAEVKKPGASVKVSCKASGYTFTSYLLQWVRQAPGQGLEWMGRIDPMTGGMMYAQKFQGRATLTVDTSTSTAYMELSRLRSDDTAVYYCARWDYGGYFDVWGQGTLVTVSS

SEQ ID NO: 818 - protein, 118 aa, Artificial Sequence
  source: /note="Description of Artificial Sequence: Synthetic polypeptide"
EVQLVQSGAEVKKPGASVKVSCKASGYTFTSYWMHWVRQAPGQGLEWMGRIDPHSGGKKYAQKFQGRATLTVDTSTSTAYMELSRLRSDDTAVYYCARWDYGGYFDVWGQGTLVTVSS

SEQ ID NO: 819 - protein, 118 aa, Artificial Sequence
  source: /note="Description of Artificial Sequence: Synthetic polypeptide"
EVQLVQSGAEVKKPGASVKVSCKASGYTFTRYWMHWVRQAPGQGLEWMGRIDPQSGGMKYAQKFQGRATLTVDTSTSTAYMELSRLRSDDTAVYYCARWDYGGYFDVWGQGTLVTVSS

SEQ ID NO: 820 - protein, 118 aa, Artificial Sequence
  source: /note="Description of Artificial Sequence: Synthetic polypeptide"
EVQLVQSGAEVKKPGASVKVSCKASGYTFTSYWLNWVRQAPGQGLEWMGRIDPQSGGVRYAQKFQGRATLTVDTSTSTAYMELSRLRSDDTAVYYCARWDYGGYFDVWGQGTLVTVSS

SEQ ID NO: 821 - protein, 118 aa, Artificial Sequence
  source: /note="Description of Artificial Sequence: Synthetic polypeptide"
EVQLVQSGAEVKKPGASVKVSCKASGYTFTRYGMNWVRQAPGQGLEWMGRIDPQSGGNKYAQKFQGRATLTVDTSTSTAYMELSRLRSDDTAVYYCARWDWGGYFDVWGQGTLVTVSS

SEQ ID NO: 822 - protein, 118 aa, Artificial Sequence
  source: /note="Description of Artificial Sequence: Synthetic polypeptide"
EVQLVQSGAEVKKPGASVKVSCKASGYTFTSYLMHWVRQAPGQGLEWMGRIDPHRGDSYYAQKFQGRATLTVDTSTSTAYMELSRLRSDDTAVYYCARWDWGGYFDVWGQGTLVTVSS

SEQ ID NO: 823 - protein, 118 aa, Artificial Sequence
  source: /note="Description of Artificial Sequence: Synthetic polypeptide"
EVQLVQSGAEVKKPGASVKVSCKASGYTFTRYLLAWVRQAPGQGLEWMGRIDPQSGGIRYAQKFQGRATLTVDTSTSTAYMELSRLRSDDTAVYYCARWDYGGYFDVWGQGTLVTVSS

SEQ ID NO: 824 - protein, 118 aa, Artificial Sequence
  source: /note="Description of Artificial Sequence: Synthetic polypeptide"
EVQLVQSGAEVKKPGASVKVSCKASGYTFTSYWMHWVRQAPGQGLEWMGRIDPLSGGILYAQKFQGRATLTVDTSTSTAYMELSRLRSDDTAVYYCARWDYGGYFDVWGQGTLVTVSS

SEQ ID NO: 825 - protein, 118 aa, Artificial Sequence
  source: /note="Description of Artificial Sequence: Synthetic polypeptide"
EVQLVQSGAEVKKPGASVKVSCKASGYTFTSYLIHWVRQAPGQGLEWMGRIDPESGGIKYAQKFQGRATLTVDTSTSTAYMELSRLRSDDTAVYYCARWDYGGYFDVWGQGTLVTVSS

SEQ ID NO: 826 - protein, 118 aa, Artificial Sequence
  source: /note="Description of Artificial Sequence: Synthetic polypeptide"
EVQLVQSGAEVKKPGASVKVSCKASGYTFTSYLLQWVRQAPGQGLEWMGRIDPRNGGIIYAQKFQGRATLTVDTSTSTAYMELSRLRSDDTAVYYCARWDWGGYFDVWGQGTLVTVSS

SEQ ID NO: 827 - protein, 118 aa, Artificial Sequence
  source: /note="Description of Artificial Sequence: Synthetic polypeptide"
EVQLVQSGAEVKKPGASVKVSCKASGYTFTRYWTHWVRQAPGQGLEWMGRIDPLHGGSKYAQKFQGRATLTVDTSTSTAYMELSRLRSDDTAVYYCARWDHGGYFDVWGQGTLVTVSS

SEQ ID NO: 828 - protein, 107 aa, Artificial Sequence
  source: /note="Description of Artificial Sequence: Synthetic polypeptide"
DIQMTQSPSSLSASVGDRVTITCRASQDITNYLNWYQQKPGKAVKLLIYYTSGLETGVPSRFSGSGSGTDYTLTISSLQPEDFATYFCQQGDTLPWTFGQGTKLEIK

SEQ ID NO: 829 - protein, 107 aa, Artificial Sequence
  source: /note="Description of Artificial Sequence: Synthetic polypeptide"
DIQMTQSPSSLSASVGDRVTITCRASQDIYHYLNWYQQKPGKAVKLLIYYSSMLETGVPSRFSGSGSGTDYTLTISSLQPEDFATYFCQQGDTTPWTFGQGTKLEIK

SEQ ID NO: 830 - protein, 107 aa, Artificial Sequence
  source: /note="Description of Artificial Sequence: Synthetic polypeptide"
DIQMTQSPSSLSASVGDRVTITCRASQDIYNYLNWYQQKPGKAVKLLIYYNSKLETGVPSRFSGSGSGTDYTLTISSLQPEDFATYFCQQGDTLPWTFGQGTKLEIK

SEQ ID NO: 831 - protein, 107 aa, Artificial Sequence
  source: /note="Description of Artificial Sequence: Synthetic polypeptide"
DIQMTQSPSSLSASVGDRVTITCRASQDIYNYLNWYQQKPGKAVKLLIYYTSSLETGVPSRFSGSGSGTDYTLTISSLQPEDFATYFCQQGDSLPWTFGQGTKLEIK

SEQ ID NO: 832 - protein, 107 aa, Artificial Sequence
  source: /note="Description of Artificial Sequence: Synthetic polypeptide"
DIQMTQSPSSLSASVGDRVTITCRASQDIYNYLNWYQQKPGKAVKLLIYYTSQLETGVPSRFSGSGSGTDYTLTISSLQPEDFATYFCQQGDTPPWTFGQGTKLEIK

SEQ ID NO: 833 - protein, 107 aa, Artificial Sequence
  source: /note="Description of Artificial Sequence: Synthetic polypeptide"
DIQMTQSPSSLSASVGDRVTITCRASQDIYHYLNWYQQKPGKAVKLLIYYTSRLHSGVPSRFSGSGSGTDYTLTISSLQPEDFATYFCQQGDILPWTFGQGTKLEIK

SEQ ID NO: 834 - protein, 107 aa, Artificial Sequence
  source: /note="Description of Artificial Sequence: Synthetic polypeptide"
DIQMTQSPSSLSASVGDRVTITCRASQDITNYLNWYQQKPGKAVKLLIYYTSMLETGVPSRFSGSGSGTDYTLTISSLQPEDFATYFCQQGDTLPWTFGQGTKLEIK

SEQ ID NO: 835 - protein, 107 aa, Artificial Sequence
  source: /note="Description of Artificial Sequence: Synthetic polypeptide"
DIQMTQSPSSLSASVGDRVTITCRASQDINKYLNWYQQKPGKAVKLLIYYTSRLETGVPSRFSGSGSGTDYTLTISSLQPEDFATYFCQQGDILPWTFGQGTKLEIK

SEQ ID NO: 836 - protein, 107 aa, Artificial Sequence
  source: /note="Description of Artificial Sequence: Synthetic polypeptide"
DIQMTQSPSSLSASVGDRVTITCRASQDIANYLNWYQQKPGKAVKLLIYYTSRLHSGVPSRFSGSGSGTDYTLTISSLQPEDFATYFCQQGDTLPWTFGQGTKLEIK

SEQ ID NO: 837 - protein, 107 aa, Artificial Sequence
  source: /note="Description of Artificial Sequence: Synthetic polypeptide"
DIQMTQSPSSLSASVGDRVTITCRASQDIFNYLNWYQQKPGKAVKLLIYYSSMLETGVPSRFSGSGSGTDYTLTISSLQPEDFATYFCQQGDAQPWTFGQGTKLEIK

SEQ ID NO: 838 - protein, 107 aa, Artificial Sequence
  source: /note="Description of Artificial Sequence: Synthetic polypeptide"
DIQMTQSPSSLSASVGDRVTITCRASQDITNYLNWYQQKPGKAVKLLIYYTSILETGVPSRFSGSGSGTDYTLTISSLQPEDFATYFCQQGDTLPWTFGQGTKLEIK

SEQ ID NO: 839 - protein, 107 aa, Artificial Sequence; identical to SEQ ID NO: 757
  source: /note="Description of Artificial Sequence: Synthetic polypeptide"

SEQ ID NO: 840 - protein, 107 aa, Artificial Sequence
  source: /note="Description of Artificial Sequence: Synthetic polypeptide"
DIQMTQSPSSLSASVGDRVTITCRASQDIYNYLNWYQQKPGKAVKLLIYYTSSLHSGVPSRFSGSGSGTDYTLTISSLQPEDFATYFCQQGDTLPWTFGQGTKLEIK

SEQ ID NO: 841 - protein, 107 aa, Artificial Sequence
  source: /note="Description of Artificial Sequence: Synthetic polypeptide"
DIQMTQSPSSLSASVGDRVTITCRASQDITNYLNWYQQKPGKAVKLLIYYTSRLETGVPSRFSGSGSGTDYTLTISSLQPEDFATYFCQQGDTLPWTFGQGTKLEIK

SEQ ID NO: 842 - protein, 107 aa, Artificial Sequence
  source: /note="Description of Artificial Sequence: Synthetic polypeptide"
DIQMTQSPSSLSASVGDRVTITCRASQDIYKYLNWYQQKPGKAVKLLIYYTSRLETGVPSRFSGSGSGTDYTLTISSLQPEDFATYFCQQGDTLPWTFGQGTKLEIK

SEQ ID NO: 843 - protein, 107 aa, Artificial Sequence
  source: /note="Description of Artificial Sequence: Synthetic polypeptide"
DIQMTQSPSSLSASVGDRVTITCRASQDITNYLNWYQQKPGKAVKLLIYYTSLLETGVPSRFSGSGSGTDYTLTISSLQPEDFATYFCQQGDTVPWTFGQGTKLEIK

SEQ ID NO: 844 - protein, 107 aa, Artificial Sequence; identical to SEQ ID NO: 163
  source: /note="Description of Artificial Sequence: Synthetic polypeptide"

SEQ ID NO: 845 - protein, 107 aa, Artificial Sequence; identical to SEQ ID NO: 773
  source: /note="Description of Artificial Sequence: Synthetic polypeptide"

SEQ ID NO: 846 - protein, 107 aa, Artificial Sequence
  source: /note="Description of Artificial Sequence: Synthetic polypeptide"
DIQMTQSPSSLSASVGDRVTITCRASQDITYYLNWYQQKPGKAVKLLIYYTSWLETGVPSRFSGSGSGTDYTLTISSLQPEDFATYFCQQGDALPWTFGQGTKLEIK

SEQ ID NO: 847 - protein, 107 aa, Artificial Sequence
  source: /note="Description of Artificial Sequence: Synthetic polypeptide"
DIQMTQSPSSLSASVGDRVTITCRASQDIANYLNWYQQKPGKAVKLLIYYTSGLETGVPSRFSGSGSGTDYTLTISSLQPEDFATYFCQQGDILPWTFGQGTKLEIK

SEQ ID NO: 848 - protein, 107 aa, Artificial Sequence
  source: /note="Description of Artificial Sequence: Synthetic polypeptide"
DIQMTQSPSSLSASVGDRVTITCRASQDITNYLNWYQQKPGKAVKLLIYYKSRLETGVPSRFSGSGSGTDYTLTISSLQPEDFATYFCQQGDILPWTFGQGTKLEIK

SEQ ID NO: 849 - protein, 118 aa, Artificial Sequence
  source: /note="Description of Artificial Sequence: Synthetic polypeptide"
EVQLVQSGAEVKKPGASVKVSCKASGYTFTRYLVQWVRQAPGQGLEWMGRIDPQCGDLKYAQKFQGRATLTVDTSTSTAYMELSRLRSDDTAVYYCARWDYGGYFDVWGQGTLVTVSS

SEQ ID NO: 850 - protein, 118 aa, Artificial Sequence
  source: /note="Description of Artificial Sequence: Synthetic polypeptide"
EVQLVQSGAEVKKPGASVKVSCKASGYTFTRYYLNWVRQAPGQGLEWMGRIDPQSGGTKYAQKFQGRATLTVDTSTSTAYMELSRLRSDDTAVYYCARWDWGGYFDVWGQGTLVTVSS

SEQ ID NO: 851 - protein, 118 aa, Artificial Sequence
  source: /note="Description of Artificial Sequence: Synthetic polypeptide"
EVQLVQSGAEVKKPGASVKVSCKASGYTFTRYLNQWVRQAPGQGLEWMGRIDPQNGEINYAQKFQGRATLTVDTSTSTAYMELSRLRSDDTAVYYCARWDYGGYFDVWGQGTLVTVSS

SEQ ID NO: 852 - protein, 118 aa, Artificial Sequence
  source: /note="Description of Artificial Sequence: Synthetic polypeptide"
EVQLVQSGAEVKKPGASVKVSCKASGYTFTSYLQSWVRQAPGQGLEWMGRIDPQSGGSRYAQKFQGRATLTVDTSTSTAYMELSRLRSDDTAVYYCARWDWGGQFDVWGQGTLVTVSS

SEQ ID NO: 853 - protein, 118 aa, Artificial Sequence
  source: /note="Description of Artificial Sequence: Synthetic polypeptide"
EVQLVQSGAEVKKPGASVKVSCKASGYTFTSYYMNWVRQAPGQGLEWMGRIDPESGGSKYAQKFQGRATLTVDTSTSTAYMELSRLRSDDTAVYYCARWDYGGYFDVWGQGTLVTVSS

SEQ ID NO: 854 - protein, 118 aa, Artificial Sequence
  source: /note="Description of Artificial Sequence: Synthetic polypeptide"
EVQLVQSGAEVKKPGASVKVSCKASGYTFTTYYMNWVRQAPGQGLEWMGRIDPLNGGVRYAQKFQGRATLTVDTSTSTAYMELSRLRSDDTAVYYCARWDYGGYFDVWGQGTLVTVSS

SEQ ID NO: 855 - protein, 118 aa, Artificial Sequence
  source: /note="Description of Artificial Sequence: Synthetic polypeptide"
EVQLVQSGAEVKKPGASVKVSCKASGYTFTSYLVQWVRQAPGQGLEWMGRIDPQDGGVRYAQKFQGRATLTVDTSTSTAYMELSRLRSDDTAVYYCARWDYGGYFDVWGQGTLVTVSS

SEQ ID NO: 856 - protein, 118 aa, Artificial Sequence
  source: /note="Description of Artificial Sequence: Synthetic polypeptide"
EVQLVQSGAEVKKPGASVKVSCKASGYTFTSYYMQWVRQAPGQGLEWMGRIDPESGGVKYAQKFQGRATLTVDTSTSTAYMELSRLRSDDTAVYYCARWDYGGYFDVWGQGTLVTVSS

SEQ ID NO: 857 - protein, 118 aa, Artificial Sequence
  source: /note="Description of Artificial Sequence: Synthetic polypeptide"
EVQLVQSGAEVKKPGASVKVSCKASGYTFTNYYINWVRQAPGQGLEWMGRIDPQSGGVKYAQKFQGRATLTVDTSTSTAYMELSRLRSDDTAVYYCARWDYGGYFDVWGQGTLVTVSS

SEQ ID NO: 858 - protein, 118 aa, Artificial Sequence
  source: /note="Description of Artificial Sequence: Synthetic polypeptide"
EVQLVQSGAEVKKPGASVKVSCKASGYTFTIYDMHWVRQAPGQGLEWMGRIDPQSGGIKYAQKFQGRATLTVDTSTSTAYMELSRLRSDDTAVYYCARWDYGGYFDVWGQGTLVTVSS

SEQ ID NO: 859 - protein, 118 aa, Artificial Sequence
  source: /note="Description of Artificial Sequence: Synthetic polypeptide"
EVQLVQSGAEVKKPGASVKVSCKASGYTFTRYYLSWVRQAPGQGLEWMGRIDPHIGGIKYAQKFQGRATLTVDTSTSTAYMELSRLRSDDTAVYYCARWDWGGYFDVWGQGTLVTVSS

SEQ ID NO: 860 - protein, 118 aa, Artificial Sequence
  source: /note="Description of Artificial Sequence: Synthetic polypeptide"
EVQLVQSGAEVKKPGASVKVSCKASGYTFTSYFMNWVRQAPGQGLEWMGRIDPLDGSIKYAQKFQGRATLTVDTSTSTAYMELSRLRSDDTAVYYCARWDYGGYFDVWGQGTLVTVSS

SEQ ID NO: 861 - protein, 118 aa, Artificial Sequence
  source: /note="Description of Artificial Sequence: Synthetic polypeptide"
EVQLVQSGAEVKKPGASVKVSCKASGYTFTSYLMQWVRQAPGQGLEWMGRIDPQIGDSIYAQKFQGRATLTVDTSTSTAYMELSRLRSDDTAVYYCARWDWGGYFDVWGQGTLVTVSS

SEQ ID NO: 862 - protein, 118 aa, Artificial Sequence
  source: /note="Description of Artificial Sequence: Synthetic polypeptide"
EVQLVQSGAEVKKPGASVKVSCKASGYTFTSYYMNWVRQAPGQGLEWMGRIDPQSGGVKYAQKFQGRATLTVDTSTSTAYMELSRLRSDDTAVYYCARWDYGGYFDVWGQGTLVTVSS

SEQ ID NO: 863 - protein, 118 aa, Artificial Sequence
  source: /note="Description of Artificial Sequence: Synthetic polypeptide"
EVQLVQSGAEVKKPGASVKVSCKASGYTFTSYYINWVRQAPGQGLEWMGRIDPQSGDIKYAQKFQGRATLTVDTSTSTAYMELSRLRSDDTAVYYCARWDYGGYFDVWGQGTLVTVSS

SEQ ID NO: 864 - protein, 118 aa, Artificial Sequence
  source: /note="Description of Artificial Sequence: Synthetic polypeptide"
EVQLVQSGAEVKKPGASVKVSCKASGYTFTGYFLNWVRQAPGQGLEWMGRIDPQSGGRIYAQKFQGRATLTVDTSTSTAYMELSRLRSDDTAVYYCARWDWGGYFDVWGQGTLVTVSS

SEQ ID NO: 865 - protein, 118 aa, Artificial Sequence
  source: /note="Description of Artificial Sequence: Synthetic polypeptide"
EVQLVQSGAEVKKPGASVKVSCKASGYTFTRYYTNWVRQAPGQGLEWMGRIDPQTGGIRYAQKFQGRATLTVDTSTSTAYMELSRLRSDDTAVYYCARWDYGGYFDVWGQGTLVTVSS

SEQ ID NO: 866 - protein, 118 aa, Artificial Sequence
  source: /note="Description of Artificial Sequence: Synthetic polypeptide"
EVQLVQSGAEVKKPGASVKVSCKASGYTFTSYWMQWVRQAPGQGLEWMGRIDPQIGDTKYAQKFQGRATLTVDTSTSTAYMELSRLRSDDTAVYYCARWDYGGYFDVWGQGTLVTISS

SEQ ID NO: 867 - protein, 118 aa, Artificial Sequence
  source: /note="Description of Artificial Sequence: Synthetic polypeptide"
EVQLVQSGAEVKKPGASVKVSCKASGYTFTRYWMHWVRQAPGQGLEWMGRIDPQDGGIIYAQKFQGRATLTVDTSTSTAYMELSRLRSDDTAVYYCARWDYGGYFDVWGQGTLVTVSS

SEQ ID NO: 868 - protein, 118 aa, Artificial Sequence
  source: /note="Description of Artificial Sequence: Synthetic polypeptide"
EVRLVQSGAEVKKPGASVKVSCKASGYTFTRYWLQWVRQASGQGLEWMGRIDPLDGGTKYAQKFQGRATLTVDTSTSTAYMELSRLRSDDTAVYYCARWDYGGYFDVWGQGTLVTVSS

SEQ ID NO: 869 - protein, 118 aa, Artificial Sequence
  source: /note="Description of Artificial Sequence: Synthetic polypeptide"
EVQLVQSGAEVKKPGASVKVSCKASGYTFTYYDVHWVRQAPGQGLEWMGRIDPHDGGIKYAQKFQGRATLTVDTSTSTAYMELSRLRSDDTAVYYCARWDYGGYFDVWGQGTLVTVSS

SEQ ID NO: 870 - protein, 118 aa, Artificial Sequence
  source: /note="Description of Artificial Sequence: Synthetic polypeptide"
EVQLVQSGAEVKKPGASVKVSCKASGYTFTGYYVNWVRQAPGQGLEWMGRIDPESGGMLYAQKFQGRATLTVDTSTSTAYMELSRLRSDDTAVYYCARWDYGGYFDVWGQGTLVTVSS

SEQ ID NO: 871 - protein, 118 aa, Artificial Sequence
  source: /note="Description of Artificial Sequence: Synthetic polypeptide"
EVQLVQSGAEVKKPGASVKVSCKASGYTFTRYWLQWVRQAPGQGLEWMGRIDPQGGDIKYAQKFQGRATLTVDTSTSTAYMELSRLRSDDTAVYYCARWDYGGYFDVWGHGTLVTVSS

SEQ ID NO: 872 - protein, 118 aa, Artificial Sequence
  source: /note="Description of Artificial Sequence: Synthetic polypeptide"
EVQLVQSGAEVKKPGASVKVSCKASGYTFTSYDMHWVRQAPGQGLEWMGRIDPQSGGTRYAQKFQGRATLTVDTSTSTAYMELSRLRSDDTAVYYCARWDYGGYFDVWGQGTLVTVSS

SEQ ID NO: 873 - protein, 118 aa, Artificial Sequence
  source: /note="Description of Artificial Sequence: Synthetic polypeptide"
EVQLVQSGAEVKKPGASVKVSCKASGYTFTSYYMNWVRQAPGQGLEWMGRIDPQSGGNKYAQKFQGRATLTVDTSTSTAYMELSRLRSDDTAVYYCARWDYGGYFDVWGQGTLVTVSS

SEQ ID NO: 874 - protein, 118 aa, Artificial Sequence
  source: /note="Description of Artificial Sequence: Synthetic polypeptide"
EVQLVQSGAEVKKPGASVKVSCKASGYTFTSYDIHWVRQAPGQGLEWMGRIDPESGGIKYAQKFQGRATLTVDTSTSTAYMELSRLRSDDTAVYYCARWDYGGYFDVWGQGTLVTVSS

SEQ ID NO: 875 - protein, 118 aa, Artificial Sequence
  source: /note="Description of Artificial Sequence: Synthetic polypeptide"
EVQLVQSGAEVKKPGASVKVSCKASGYTFTSYLIQWVRQAPGQGLEWMGRIDPQSGGVKYAQKFQGRATLTVDTSTSTAYMELSRLRSDDTAVYYCARWDYGGQFDVWGQGTLVSVSS

SEQ ID NO: 876 - protein, 118 aa, Artificial Sequence
  source: /note="Description of Artificial Sequence: Synthetic polypeptide"
EVQLVQSGAEVKKPGASVKVSCKASGYTFTSYYLNWVRQAPGQGLEWMGRIDPQGGGLKYAQKFQGRATLTVDTSTSTAYMELSRLRSDDTAVYYCARWDYGGYFDVWGQGTLVTVSS

SEQ ID NO: 877 - protein, 118 aa, Artificial Sequence
  source: /note="Description of Artificial Sequence: Synthetic polypeptide"
EVQLVQSGAEVKKPGASVKVSCKASGYTFTSYYLNWVRQAPGQGLEWMGRIDPKSGDIIYAQKFQGRATLTVDTSTSTAYMELSRLRSDDTAVYYCARWDYGGYFDVWGQGTLVTVSS

SEQ ID NO: 878 - protein, 118 aa, Artificial Sequence
  source: /note="Description of Artificial Sequence: Synthetic polypeptide"
EVQLVQSGAEVKKPGASVKVSCKASGYTFTRYYVNWVRQAPGQGLEWMGRIDPESGGIKYAQKFQGRATLTVDTSTSTAYMELSRLRSDDTAVYYCARWDYGGYFDVWGQGTLVTVSS

SEQ ID NO: 879 - protein, 118 aa, Artificial Sequence
  source: /note="Description of Artificial Sequence: Synthetic polypeptide"
EVQLVQSGAEVKKPGASVKVSCKASGYTFTTYYMSWVRQAPGQGLEWMGRIDPQSGGSKYAQKFQGRATLTVDTSTSTAYMELSRLRSDDTAVYYCARWDYGGYFDVWGQGTLVTVSS

SEQ ID NO: 880 - protein, 118 aa, Artificial Sequence
  source: /note="Description of Artificial Sequence: Synthetic polypeptide"
EVQLVQSGAEVKKPGASVKVSCKASGYTFTTYFMNWVRQAPGQGLEWMGRIDPQSGGIKYAQKFQGRATLTVDTSTSTAYMELSRLRSDDTAVYYCARWDYGGYFDVWGQGTLVTVSS

SEQ ID NO: 881 - protein, 118 aa, Artificial Sequence
  source: /note="Description of Artificial Sequence: Synthetic polypeptide"
EVQLVQSGAEVKKPGASVKVSCKASGYTFTRYLMQWVRQAPGQGLEWMGRIDPQDGGIKYAQKFQGRATLTVDTSTSTAYMELSRLRSDDTAVYYCARWDYGGYFDVWGQGTLVTVSS

SEQ ID NO: 882 - protein, 118 aa, Artificial Sequence
  source: /note="Description of Artificial Sequence: Synthetic polypeptide"
EVQLVZSGAEVKKPGASVKVSCKZSGYTFTSYLLSWVRQAPGQGLEWMGRIDPQSGGIRYAQKFQGRATLTVDTSTSTAYMELSRLRSDDTAVYYCARWDYGGYFDVWGQGTLVTVSS

SEQ ID NO: 883 - protein, 118 aa, Artificial Sequence
  source: /note="Description of Artificial Sequence: Synthetic polypeptide"
EVQLVQSGAEVKKPGASVKVSCKASGYTFTRYWMQWVRQAPGQGLEWMGRIDPQSGDVRYAQKFQGRATLTVDTSTSTAYMELSRLRSDDTAVYYCARWDYGGYFDVWGQGTLVTVSS

SEQ ID NO: 884 - protein, 118 aa, Artificial Sequence
  source: /note="Description of Artificial Sequence: Synthetic polypeptide"
EVQLVQSGAEVKKPGASVKVSCKASGYTFTTYYMHWVRQAPGQGLEWMGRIDPQIGESKYAQKFQGRATLTVDTSTSTAYMELSRLRSDDTAVYYCARWDYGGYFDVWGQGTLVTVSS

SEQ ID NO: 885 - protein, 118 aa, Artificial Sequence
  source: /note="Description of Artificial Sequence: Synthetic polypeptide"
EVQLVQSGAEVKKPGASVKVSCKASGYTFTSYLINWVRQAPGQGLEWMGRIDPEDGGNKYAQKFQGRATLTVDTSTSTAYMELSRLRSDDTAVYYCARWDYGGYFDVWGHGTLVTVSS

SEQ ID NO: 886 - protein, 118 aa, Artificial Sequence
  source: /note="Description of Artificial Sequence: Synthetic polypeptide"
EVQLVQSGAEVKKPGASVKVSCKASGYTFTSYYMTWVRQAPGQGLEWMGRIDPQSGGGKYAQKFQGRATLTVDTSTSTAYMELSRLRSDDTAVYYCARWDYGGQFDVWGQGTLVTVSS

SEQ ID NO: 887 - protein, 118 aa, Artificial Sequence
  source: /note="Description of Artificial Sequence: Synthetic polypeptide"
EVQLVQSGAEVKKPGASVKVSCKASGYTFTRYWIQWVRQAPGQGLEWMGRIDPQIGEKRYAQKFQGRATLTVDTSTSTAYMELSRLRSDDTAVYYCARWDYGGYFDVWGQGTLVTVSS

SEQ ID NO: 888 - protein, 118 aa, Artificial Sequence
  source: /note="Description of Artificial Sequence: Synthetic polypeptide"
EVQLVQSGAEVKKPGASVKVSCKASGYTFTSYDTHWVRQAPGQGLEWMGRIDPENGGTKYAQKFQGRATLTVDTSTSTAYMELSRLRSDDTAVYYCARWDWGGYFDVWGQGTLVTVSS

SEQ ID NO: 889 - protein, 118 aa, Artificial Sequence
  source: /note="Description of Artificial Sequence: Synthetic polypeptide"
EVQLVQSGAEVKKPGASVKVSCKASGYTFTTYDMHWVRQAPGQGLEWMGRIDPQSGGIKYAQKFQGRATLTVDTSTSTAYMELSRLRSDDTAVYYCARWDYGGYFDVWGQGTLVTVSS

SEQ ID NO: 890 - protein, 118 aa, Artificial Sequence
  source: /note="Description of Artificial Sequence: Synthetic polypeptide"
EVQLVQSGAEVKKPGASVKVSCKASGYTFTSYYMNWVRQAPGQGLEWMGRIDPESGGIKYAQKFQGRATLTVDTSTSTAYMELSRLRSDDTAVYYCARWDYGGYFDVWGQGTLVTVSS

SEQ ID NO: 891 - protein, 118 aa, Artificial Sequence
  source: /note="Description of Artificial Sequence: Synthetic polypeptide"
EVQLVQSGAEVKKPGASVKVSCKASGYTFTSYYMNWVRQAPGQGLEWMGRIDPQSGGIIYAQKFQGRATLTVDTSTSTAYMELSRLRSDDTAVYYCARFDYGGYFDVWGQGTLVTVSS

SEQ ID NO: 892 - protein, 118 aa, Artificial Sequence
  source: /note="Description of Artificial Sequence: Synthetic polypeptide"
EVQLVQSGAEVKKPGASVKVSCKASGYTFTRYDLHWVRQAPGQGLEWMGRIDPISGGIKYAQKFQGRATLTVDTSTSTAYMELSRLRSDDTAVYYCARWDYGGYFDVWGQGTLVTVSS

SEQ ID NO: 893 - protein, 118 aa, Artificial Sequence
  source: /note="Description of Artificial Sequence: Synthetic polypeptide"
EVQLVQSGAEVKKPGASVKVSCKASGYTFTRYWIQWVRQAPGQGLEWMGRIDPQDGGIKYAQKFQGRATLTVDTSTSTAYMELSRLRSDDTAVYYCARWDYGGYFDVWGQGTLVTVSS

SEQ ID NO: 894 - protein, 107 aa, Artificial Sequence
  source: /note="Description of Artificial Sequence: Synthetic polypeptide"
DIQMTQSPSSLSASVGDRVTITCRASQDIWKYLNWYQQKPGKAVKLLIYYTSILETGVPSRFSGSGSGTDYTLTISSLQPEDFATYFCQQGDSLPWTFGQGTKLEIK

SEQ ID NO: 895 - protein, 107 aa, Artificial Sequence
  source: /note="Description of Artificial Sequence: Synthetic polypeptide"
DIQMTQSPSSLSASVGDRVTITCRASQDIWNYLNWYQQKPGKAVKLLIYYTSILETGVPSRFSGSGSGTDYTLTISSLQPEDFATYFCQQGDTLPWTFGQGTKLDIK

SEQ ID NO: 896 - protein, 107 aa, Artificial Sequence; identical to SEQ ID NO: 651
  source: /note="Description of Artificial Sequence: Synthetic polypeptide"

SEQ ID NO: 897 - protein, 107 aa, Artificial Sequence
  source: /note="Description of Artificial Sequence: Synthetic polypeptide"
DIQMTQSPSSLSASVGDRVTITCRASQDIWNYLNWYQQKPGKAVKLLIYYTSMLETGVPSRFSGSGSGTDYTLTISSLQPEDFATYFCQQGDSLPWTFGQGTKLEIK

SEQ ID NO: 898 - protein, 107 aa, Artificial Sequence
  source: /note="Description of Artificial Sequence: Synthetic polypeptide"
DIQMTQSPSSLSASVGDRVTITCRASQDIWHYLNWYQQKPGKAVKLLIYYTSELETGVPSRFSGSGSGTDYTLTISSLQPEDFATYFCQQGDTLPWTFGQGTKLEIK

SEQ ID NO: 899 - protein, 107 aa, Artificial Sequence; identical to SEQ ID NO: 644
  source: /note="Description of Artificial Sequence: Synthetic polypeptide"

SEQ ID NO: 900 - protein, 107 aa, Artificial Sequence
  source: /note="Description of Artificial Sequence: Synthetic polypeptide"
DIQMTQSPSSLSASVGDRVTITCRASQDIWNYLNWYQQKPGKAVKLLIYYTSGLHSGVPSRFSGSGSGTDYTLTISSLQPEDFATYFCQQGDILPWTFGQGTKLEIK

SEQ ID NO: 901 - protein, 107 aa, Artificial Sequence
  source: /note="Description of Artificial Sequence: Synthetic polypeptide"
DIQMTQSPSSLSASVGDRVTITCRASQDIWKYLNWYQQKPGKAVKLLIYYTSGLETGVPSRFSGSGSGTDYTLTISSLQPEDFATYFCQQGDTLPWTFGQGTKLEIK

SEQ ID NO: 902 - protein, 107 aa, Artificial Sequence
  source: /note="Description of Artificial Sequence: Synthetic polypeptide"
DIQMTQSPSSLSASVGDRVTITCRASQDIWNYLNWYQQKPGKAVKLLIYYTSMLHSGVPSRFSGSGSGTDYTLTISSLQPEDFATYFCQQGDSLPWTFGQGTKLEIK

SEQ ID NO: 903 - protein, 107 aa, Artificial Sequence
  source: /note="Description of Artificial Sequence: Synthetic polypeptide"
DIQMTQSPSSLSASVGDRVTITCRASQDIWNYLNWYQQKPGKAVKLLIYYTSGLETGVPSRFSGSGSGTDYTLTISSLQPEDFATYFCQQGDSLPWTFGQGTKLEIK

SEQ ID NO: 904 - protein, 107 aa, Artificial Sequence
  source: /note="Description of Artificial Sequence: Synthetic polypeptide"
DIQMTQSPSSLSASVGDRVTITCRASQDIWNYLNWYQQKPGKAVKLLIYYTSMLHSGVPSRFSGSGSGTDYTLTISSLQPEDFATYFCQQGDTLPWTFGQGTKLEIK

SEQ ID NO: 905 - protein, 107 aa, Artificial Sequence; identical to SEQ ID NO: 635
  source: /note="Description of Artificial Sequence: Synthetic polypeptide"

SEQ ID NO: 906 - protein, 107 aa, Artificial Sequence
  source: /note="Description of Artificial Sequence: Synthetic polypeptide"
DIQMTQSPSSLSASVGDRVTITCRASQDIWNYLNWYQQKPGKAVKLLIYYTSRLETGVPSRFSGSGSGTDYTLTISSLQPEDFATYFCQQGDNLPWTFGQGTKLEIK

SEQ ID NO: 907 - protein, 107 aa, Artificial Sequence
  source: /note="Description of Artificial Sequence: Synthetic polypeptide"
DIQMTQSPSSLSASVGDRVTITCRASQDIWNYLNWYQQKPGKAVKLLIYYTSRLHSGVPSRFSGSGSGTDYTLTISSLQPEDFATYFCQQGDALPWTFGQGTKLEIK

SEQ ID NO: 908 - protein, 107 aa, Artificial Sequence
  source: /note="Description of Artificial Sequence: Synthetic polypeptide"
DIQMTQSPSSLSASVGDRVTITCRASQDIWNYLNWYQQKPGKAVKLLIYYTSVLETGVPSRFSGSGSGTDYTLTISSLQPEDFATYFCQQGDNLPWTFGQGTKLEIK

SEQ ID NO: 909 - protein, 107 aa, Artificial Sequence
  source: /note="Description of Artificial Sequence: Synthetic polypeptide"
DIQMTQSPSSLSASVGDRVTITCRASQDIWNYLNWYQQKPGKAVKLLIYYTSVLETGVPSRFSGSGSGTDYTLTISSLQPEDFATYFCQQGDELPWTFGQGTKLEIK

SEQ ID NO: 910 - protein, 107 aa, Artificial Sequence; identical to SEQ ID NO: 659
  source: /note="Description of Artificial Sequence: Synthetic polypeptide"

SEQ ID NO: 911 - protein, 107 aa, Artificial Sequence
  source: /note="Description of Artificial Sequence: Synthetic polypeptide"
DIQMTQSPSSLSASVGDRVTITCRASQDIWNYLNWYQQKPGKAVKLLIYYTSMLHSGVPSRFSGSGSGTDYTLTISSLQPEDFATYFCQQGDMLPWTFGQGTKLEIK

SEQ ID NO: 912 - protein, 107 aa, Artificial Sequence
  source: /note="Description of Artificial Sequence: Synthetic polypeptide"
DIQMTQSPSSLSASVGDRVTITCRASQDIWNYLNWYQQKPGKAVKLLIYYTSLLETGVPSRFSGSGSGTDYTLTISSLQPEDFATYFCQQGDTLPWTFGQGTKLEIK

SEQ ID NO: 913 - protein, 107 aa, Artificial Sequence
  source: /note="Description of Artificial Sequence: Synthetic polypeptide"
DIQMTQSPSSLSASVGDRVTITCRASQDIWNYLNWYQQKPGKAVKLLIYYTSKLETGVPSRFSGSGSGTDYTLTISSLQPEDFATYFCQQGDSLPWTFGQGTKLEIK

SEQ ID NO: 914 - protein, 107 aa, Artificial Sequence
  source: /note="Description of Artificial Sequence: Synthetic polypeptide"
DIQMTQSPSSLSASVGDRVTITCRASQDIWHYLNWYQQKPGKAVKLLIYYTSMLETGVPSRFSGSGSGTDYTLTISSLQPEDFATYFCQQGDTLPWTFGQGTKLEIK

SEQ ID NO: 915 - protein, 107 aa, Artificial Sequence
  source: /note="Description of Artificial Sequence: Synthetic polypeptide"
DIQMTQSPSSLSASVGDRVTITCRASQDIWHYLNWYQQKPGKAVKLLIYYTSMLETGVPSRFSGSGSGTDYTLTISSLQPEDFATYFCQQGDILPWTFGQGTKLEIK

SEQ ID NO: 916 - protein, 107 aa, Artificial Sequence
  source: /note="Description of Artificial Sequence: Synthetic polypeptide"
DIQMTQSPSSLSASVGDRVTITCRASQDIWHYLNWYQQKPGKTVKLLIYYTSQLHSGVPSRFSGSGSGTDYTLTISSLQPEDFATYFCQQGDTLPWTFGQGTKLEIK

SEQ ID NO: 917 - protein, 107 aa, Artificial Sequence
  source: /note="Description of Artificial Sequence: Synthetic polypeptide"
DIQMTQSPSSLSASVGDRVTITCRASQDIWNYLNWYQQKPGKAVKLLIYYTSILETGVPSRFSGSGSGTDYTLTISSLQPEDFATYFCQQGDSLPWTFGQGTKLEIK

SEQ ID NO: 918 - protein, 107 aa, Artificial Sequence
  source: /note="Description of Artificial Sequence: Synthetic polypeptide"
DIQMTQSPSSLSASVGDRVTITCRASQDIWNYLNWYQQKPGKAVKLLIYYTSGLETGVPSRFSGSGSGTDYTLTISSLQPEDFATYFCQQGDMLPWTFGQGTKLEIK

SEQ ID NO: 919 - protein, 107 aa, Artificial Sequence
  source: /note="Description of Artificial Sequence: Synthetic polypeptide"
DIQMTQSPSSLSASVGDRVTITCRASQDIWNYLNWYQQKPGKAVKLLIYYTSMLETGVPSRFSGSGSGTDYTLTISSLQPEDFATYFCQQGDALPWTFGQGTKLEIK

SEQ ID NO: 920 - protein, 107 aa, Artificial Sequence
  source: /note="Description of Artificial Sequence: Synthetic polypeptide"
DIQMTQSPSSLSASVGDRVTITCRASQDIWNYLNWYQQKPGKAVKLLIYYTSGLHSGVPSRFSGSGSGTDYTLTISSLQPEDFATYFCQQGDTLPWTFGQGTKLEIK

SEQ ID NO: 921 - protein, 118 aa, Artificial Sequence
  source: /note="Description of Artificial Sequence: Synthetic polypeptide"
EVQLVQSGAEVKKPGASVKVSCKASGYTFTSYDVHWVRQAPGQGLEWMGRIDPQSGGVKYAQKFQGRATLTVDTSTSTAYMELSRLRSDDTAVYYCARWDYGGYFDVWGQGTLVTVSS

SEQ ID NO: 922 - protein, 118 aa, Artificial Sequence
  source: /note="Description of Artificial Sequence: Synthetic polypeptide"
EVQLVQSGAEVKKPGASVKVSCKASGYTFTSYDMHWVRQAPGQGLEWMGRIDPQSGGIKYAQKFQGRATLTVDTSTSTAYMELSRLRSDDTAVYYCARWDYGGYFDVWGQGTLVTVSS

SEQ ID NO: 923 - protein, 118 aa, Artificial Sequence
  source: /note="Description of Artificial Sequence: Synthetic polypeptide"
EVQLVQSGAEVKKPGASVKVSCKASGYTFTSYDMHWVRQAPGQGLEWMGRIDPQTGGTKYAQKFQGRATLTVDTSTSTAYMELSRLRSDDTAVYYCARWDYGGYFDVWGQGTLVTVSS

SEQ ID NO: 924 - protein, 118 aa, Artificial Sequence
  source: /note="Description of Artificial Sequence: Synthetic polypeptide"
EVQLVQSGAEVKKPGASVKVSCKASGYTFTNYYMAWVRQAPGQGLEWMGRIDPQDGAIKYAQKFQGRATLTVDTSTSTAYMELSRLRSDDTAVYYCARWDYGGYFDVWGQGTLVTVSS

SEQ ID NO: 925 - protein, 118 aa, Artificial Sequence
  source: /note="Description of Artificial Sequence: Synthetic polypeptide"
EVQLVQSGAEVKKPGASVKVSCKASGYTFTRYDMHWVRQAPGQGLEWMGRIDPTSGGIKYAQKFQGRATLTVDTSTSTAYMELSRLRSDDTAVYYCARWDYGGYFDVWGQGTLVTVSS

SEQ ID NO: 926 - protein, 118 aa, Artificial Sequence
  source: /note="Description of Artificial Sequence: Synthetic polypeptide"
EVQLVQSGAEVKKPGASVKVSCKASGYTFTSYDKHWVRQAPGQGLEWMGRIDPQDGGIKYAQKFQGRATLTVDTSTSTAYMELSRLRSDDTAVYYCARWDYGGYFDVWGQGTLVTVSS

SEQ ID NO: 927 - protein, 118 aa, Artificial Sequence
  source: /note="Description of Artificial Sequence: Synthetic polypeptide"
EVQLVQSGAEVKKPGASVKVSCKASGYTFTRYDLHWVRQAPGQGLEWMGRIDPQSGGTKYAQKFQGRATLTVDTSTSTAYMELSRLRSDDTAVYYCARWDYGGQFDVWGQGTLVTVSS

SEQ ID NO: 928 - protein, 118 aa, Artificial Sequence
  source: /note="Description of Artificial Sequence: Synthetic polypeptide"
EVQLVQSGAEVKKPGASVKVSCKASGYTFTYYDMHWVRQAPGQGLEWMGRIDPYDGDIKYAQKFQGRATLTVDTSTSTAYMELSRLRSDDTAVYYCARWDYGGYFDVWGQGTLVTVSS

SEQ ID NO: 929 - protein, 118 aa, Artificial Sequence
  source: /note="Description of Artificial Sequence: Synthetic polypeptide"
EVQLVQSGAEVKKPGASVKVSCKASGYTFTFYDMHWVRQAPGQGLEWMGRIDPDRGGIKYAQKFQGGATLTVDTSTSTAYMELSRLRSDDTAVYYCARWDYGGYFDVWGQGTLVTVSS

SEQ ID NO: 930 - protein, 118 aa, Artificial Sequence
  source: /note="Description of Artificial Sequence: Synthetic polypeptide"
EVQLVQSGAEVKKPGASVKVSCKASGYTFTSYDMHWVRQAPGQGLEWMGRIDPQTGGEKYAQKFQGRATLTVDTSTSTAYMELSRLRSDDTAVYYCARWAYGGQFDVWGQGTLVTVSS

SEQ ID NO: 931 - protein, 118 aa, Artificial Sequence
  source: /note="Description of Artificial Sequence: Synthetic polypeptide"
EVQLVQSGAEVKKPGASVKVSCKASGYTFTRYDLHWVRQAPGQGLEWMGRIDPDDGGRKYAQKFQGRATLTVDTSTSTAYMELSRLRSDDTAVYYCARWDYGGYFDVWGQGTLVTVSS

SEQ ID NO: 932 - protein, 118 aa, Artificial Sequence
  source: /note="Description of Artificial Sequence: Synthetic polypeptide"
EVQLVQSGAEVKKPGASVKVSCKASGYTFTSYDMHWVRQAPGQGLEWMGRIDPQNGGDKYAQKFQGRATLTVDTSTSTAYMELSRLRSDDTAVYYCARWDYGGYFDVWGQGTLVTVSS

SEQ ID NO: 933 - protein, 118 aa, Artificial Sequence
  source: /note="Description of Artificial Sequence: Synthetic polypeptide"
EVQMVQSGAEVKKPGASVKVSCKASGYTFTSYDLHWVRQAPGQGLEWMGRIDPDSGGVKYAQKFQGRATLTVDTSTSTAYMELSRLRSDDTAVYYCARWDYGGYFDVWGQGTLVTVSS

SEQ ID NO: 934 - protein, 118 aa, Artificial Sequence
  source: /note="Description of Artificial Sequence: Synthetic polypeptide"
EVQLVQSGAEVKKPGASVKVSCKASGYTFTRYDMHWVRQAPGQGLEWMGRIDPQTGGVKYAQKFQGRATLTVDTSTSTAYMELSRLRSDDTAVYYCARWDYGGYFDVWGQGTLVTVSS

SEQ ID NO: 935 - protein, 118 aa, Artificial Sequence
  source: /note="Description of Artificial Sequence: Synthetic polypeptide"
EVQLVQSGAEVKKPGASVKVSCKASGYTFTSYDMHWVRQAPGQGLEWMGRIDPQSGGIRYAQKFQGRATLTVDTSTSTAYMELSRLRSDDTAVYYCARWDYGGYFDVWGQGTLVTVSS

SEQ ID NO: 936 - protein, 118 aa, Artificial Sequence; identical to SEQ ID NO: 935
  source: /note="Description of Artificial Sequence: Synthetic polypeptide"

SEQ ID NO: 937 - protein, 118 aa, Artificial Sequence
  source: /note="Description of Artificial Sequence: Synthetic polypeptide"
EVQLVQSGAEVKKPGASVKVSCKASGYTFTSYWMQWVRQAPGQGLEWMGRIDPQDGDIKYAQKFQGRATLTVDTSTSTAYMELSRLRSDDTAVYYCARYDYGGYFDVWGQGTLVTVSS

SEQ ID NO: 938 - protein, 118 aa, Artificial Sequence
  source: /note="Description of Artificial Sequence: Synthetic polypeptide"
EVQLVQSGAEVKKPGASVKVSCKASGYTFTSYDMHWVRQAPGQGLEWMGRIDPQSGGSKYAQKFQGRATLTVDTSTSTAYMELSRLRSDDTAVYYCARWDYGGYFDVWGQGTLVTVSS

SEQ ID NO: 939 - protein, 118 aa, Artificial Sequence
  source: /note="Description of Artificial Sequence: Synthetic polypeptide"
EVQLVQSGAEVKKPGASVKVSCKASGYTFTSYYMQWVRQAPGQGLEWMGRIDPFDGDIKYAQKFQGRATLTVDTSTSTAYMELSRLRSDDTAVYYCARWDYGGYFDVWGQGTLVTVSS

SEQ ID NO: 940 - protein, 118 aa, Artificial Sequence
  source: /note="Description of Artificial Sequence: Synthetic polypeptide"
EVQLVQSGAEVKKPGASVKVSCKASGYTFTKYDMHWVRQAPGQGLEWMGRIDPQDGGFKYAQKFQGRATLTVDTSTSTAYMELSRLRSDDTAVYYCARWDYGGYFDVWGQGTLVTVSS

SEQ ID NO: 941 - protein, 118 aa, Artificial Sequence
  source: /note="Description of Artificial Sequence: Synthetic polypeptide"
EVQLVQSGAEVKKPGASVKVSCKASGYTFTYYDMHWVRQAPGQGLEWMGRIDPQSGGIKYAQKFQGRATLTVDTSTSTAYMELSRLRSDDTAVYYCARWDYGGYFDVWGQGTLVTVSS

SEQ ID NO: 942 - protein, 118 aa, Artificial Sequence
  source: /note="Description of Artificial Sequence: Synthetic polypeptide"
EVQLVQSGAEVKKPGASVKVSCKASGYTFTSYDLHWVRQAPGQGLEWMGRIDPFNGGGKYAQKFQGRATLTVDTSTSTAYMELSRLRSDDTAVYYCARWDYGGYFDVWGQGTLVTVSS

SEQ ID NO: 943 - protein, 118 aa, Artificial Sequence
  source: /note="Description of Artificial Sequence: Synthetic polypeptide"
EVQLVQSGAEVKKPGASVKVSCKASGYTFTSYDSHWVRQAPGQGLEWMGRIDPQTGGIKYAQKFQGRATLTVDTSTSTAYMELSRLRSDDTAVYYCARWDYGGYFDVWGQGTLVTVSS

SEQ ID NO: 944 - protein, 118 aa, Artificial Sequence
  source: /note="Description of Artificial Sequence: Synthetic polypeptide"
EVQLVQSGAEVKKPGASVKVSCKASGYTFTRYDMHWVRQAPGQGLEWMGRIDPQTGGIKYAQKFQGRATLTVDTSTSTAYMELSRLRSDDTAVYYCARWDYGGYFDVWGQGTLVTVSS

SEQ ID NO: 945 - protein, 118 aa, Artificial Sequence
  source: /note="Description of Artificial Sequence: Synthetic polypeptide"
EVQLVQSGAEVKKPGASVKVSCKASGYTFTSYDMHWVRQAPGQGLEWMGRIDPQSGGTKYAQKFQGRATLTVDTSTSTAYMELSRLRSDDTAVYYCARWDYGGYFDVWGQGTLVTVSS

SEQ ID NO: 946 - protein, 118 aa, Artificial Sequence
  source: /note="Description of Artificial Sequence: Synthetic polypeptide"
EVQLVQSGAEVKKPGASVKVSCKASGYTFTSYDMHWVRQAPGQGLEWMGRIDPQDGGIRYAQKFQGRATLTVDTSTSTAYMELSRLRSDDTAVYYCARWDYGGYFDVWGQGTLVTVSS

SEQ ID NO: 947 - protein, 118 aa, Artificial Sequence; identical to SEQ ID NO: 614
  source: /note="Description of Artificial Sequence: Synthetic polypeptide"

SEQ ID NO: 948 - protein, 118 aa, Artificial Sequence
  source: /note="Description of Artificial Sequence: Synthetic polypeptide"
EVQLVQSGAEVKKPGASVKVSCKASGYTFTNYDMHWVRQAPGQGLEWMGRIDPQNGGVKYAQKFQGRATLTVDTSTSTAYMELSRLRSDDTAVYYCARWDYGGYFDVWGQGTLVTVSS

SEQ ID NO: 949 - protein, 118 aa, Artificial Sequence
  source: /note="Description of Artificial Sequence: Synthetic polypeptide"
EVQLVQSGAEVKKPGASVKVSCKASGYTFTSYDMHWVRQAPGQGLEWMGRIDPQSGGSRYAQKFQGRATLTVDTSTSTAYMELSRLRSDDTAVYYCARWDFGGYFDVWGQGTLVTVSS

SEQ ID NO: 950 - protein, 118 aa, Artificial Sequence
  source: /note="Description of Artificial Sequence: Synthetic polypeptide"
EVQLVQSGAEVKKPGASVKVSCKASGYTFTRYDMHWVRQAPGQGLEWMGRIDPQSGGIKYAQKFQGRATLTVDTSTSTAYMELSRLRSDDTAVYYCARWDYGGYFDVWGQGTLVTVSS

SEQ ID NO: 951 - protein, 107 aa, Artificial Sequence
  source: /note="Description of Artificial Sequence: Synthetic polypeptide"
DIQMTQSPSSLSASVGDRVTITCRASQDIYNYLNWYQQKPGKAVKLLIYYTSLLHSGVPSRFSGSGSGTDYTLTISSLQPEDFATYFCQQGDEVPWTFGQGTKLEIK

SEQ ID NO: 952 - protein, 107 aa, Artificial Sequence; identical to SEQ ID NO: 697
  source: /note="Description of Artificial Sequence: Synthetic polypeptide"

SEQ ID NO: 953 - protein, 107 aa, Artificial Sequence
  source: /note="Description of Artificial Sequence: Synthetic polypeptide"
DIQMTQSPSSLSASVGDRVTITCRASQDIFNYLNWYQQKPGKAVKLLIYYTSLLHSGVPSRFSGSGSGTDYTLTISSLQPEDFATYFCQQGDLLPWTFGQGTKLEIK

SEQ ID NO: 954 - protein, 107 aa, Artificial Sequence
  source: /note="Description of Artificial Sequence: Synthetic polypeptide"
DIQMTQSPSSLSASVGDRVTITCRASQDIYNYLNWYQQKPGKAVKLLIYYTSVLHSGVPSRFSGSGSGTDYTLTISSLQPEDFATYFCQQGDELPWTFGQGTKLEIK

SEQ ID NO: 955 - protein, 107 aa, Artificial Sequence
  source: /note="Description of Artificial Sequence: Synthetic polypeptide"
DIQMTQSPSSLSASVGDRVTITCRASQDIYNYLNWYQQKPGKAVKLLIYYTSVLHSGVPSRFSGSGSGTDYTLTISSLQPEDFATYFCQQGDTLPWTFGQGTKLEIK

SEQ ID NO: 956 - protein, 107 aa, Artificial Sequence
  source: /note="Description of Artificial Sequence: Synthetic polypeptide"
DIQMTQSPSSLSASVGDRVTITCRASQDIFNYLNWYQQKPGKAVKLLIYYTSILHSGVPSRFSGSGSGTDYTLTISSLQPEDFATYFCQQGDELPWTFGQGTKLEIK

SEQ ID NO: 957 - protein, 107 aa, Artificial Sequence
  source: /note="Description of Artificial Sequence: Synthetic polypeptide"
DIQMTQSPSSLSASVGDRVTITCRASQDIYNYLNWYQQKPGKAVKLLIYYTSNLHSGVPSRFSGSGSGTDYTLTISSLQPEDFATYFCQQGDELPWTFGQGTKLEIK

SEQ ID NO: 958 - protein, 107 aa, Artificial Sequence
  source: /note="Description of Artificial Sequence: Synthetic polypeptide"
DIQMTQSPSSLSASVGDRVTITCRASQDIYYYLNWYQQKPGKAVKLLIYYTSILHSGVPSRFSGSGSGTDYTLTISSLQPEDFATYFCQQGDTLPWTFGQGTKLEIK

SEQ ID NO: 959 - protein, 107 aa, Artificial Sequence
  source: /note="Description of Artificial Sequence: Synthetic polypeptide"
DIQMTQSPSSLSASVGDRVTITCRASQDIFNYLNWYQQKPGKAVKLLIYYTSYLHSGVPSRFSGSGSGTDYTLTISSLQPEDFATYFCQQGDELPWTFGQGTKLEIK

SEQ ID NO: 960 - protein, 107 aa, Artificial Sequence
  source: /note="Description of Artificial Sequence: Synthetic polypeptide"
DIQMTQSPSSLSASVGDRVTITCRASQDIYNYLNWYQQKPGKAVKLLIYYTSHLHSGVPSRFSGSGSGTDYTLTISSLQPEDFATYFCQQGDELPWTFGQGTKLEIK

SEQ ID NO: 961 - protein, 107 aa, Artificial Sequence
  source: /note="Description of Artificial Sequence: Synthetic polypeptide"
DIQMTQSPSSLSASVGDRVTITCRASQDIYNYLNWYQQKPGKAVKLLIYYTSVLHSGVPSRFSGSGSGTDYTLTISSLQPEDFATYFCQQGDALPWTFGQGTKLEIK

SEQ ID NO: 962 - protein, 107 aa, Artificial Sequence
  source: /note="Description of Artificial Sequence: Synthetic polypeptide"
DIQMTQSPSSLSASVGDRVTITCRASQDIYNYLNWYQQKPGKAVKLLIYYTSQLHSGVPSRFSGSGSGTDYTLTISSLQPEDFATYFCQQGDTLPWTFGQGTKLEIK

SEQ ID NO: 963 - protein, 107 aa, Artificial Sequence
  source: /note="Description of Artificial Sequence: Synthetic polypeptide"
DIQMTQSPSSLSASVGDRVTITCRASQDIYKYLNWYQQKPGKAVKLLIYYTSGLHSGVPSRFSGSGSGTDYTLTISSLQPEDFATYFCQQGDTLPWTFGQGTKLEIK

SEQ ID NO: 964 - protein, 107 aa, Artificial Sequence
  source: /note="Description of Artificial Sequence: Synthetic polypeptide"
DIQMTQSPSSLSASVGDRVTITCRASQDIYNYLNWYQQKPGKAVKLLIYYTSLLHSGVPSRFSGSGSGTDYTLTISSLQPEDFATYFCQQGDELPWTFGQGTKLEIK

SEQ ID NO: 965 - protein, 107 aa, Artificial Sequence
  source: /note="Description of Artificial Sequence: Synthetic polypeptide"
DIQMTQSPSSLSASVGDRVTITCKASQDIYNYLNWYQQKPGKAVKLLIYYTSHLHSGVPSRFSGSGSGTDYTLTISSLQPEDFATYFCQQGDTLPWTFGQGTKLEIK

SEQ ID NO: 966 - protein, 107 aa, Artificial Sequence
  source: /note="Description of Artificial Sequence: Synthetic polypeptide"
DIQMTQSPSSLSASVGDRVTITCRASQDIFNYLNWYQQKPGKAVKLLIYYTSILHSGVPSRFSGSGSGTDYTLTISSLQPEDFATYFCQQGDTLPWTFGQGTKLEIK

SEQ ID NO: 967 - protein, 107 aa, Artificial Sequence
  source: /note="Description of Artificial Sequence: Synthetic polypeptide"
DIQMTQSPSSLSASVGDRVTITCRASQDIYNYLNWYQQKPGKAVKLLIYYTSGLHSGVPSRFSGSGSGTDYTLTISSLQPEDFATYFCQQGDYLPWTFGQGTKLEIK

SEQ ID NO: 968 - protein, 107 aa, Artificial Sequence
  source: /note="Description of Artificial Sequence: Synthetic polypeptide"
DIQMTQSPSSLSASVGDRVTITCRASQDIYNYLNWYQQKPGKAVKLLIYYTSILHSGVPSRFSGSGSGTDYTLTISSLQPEDFATYFCQQGDELPWTFGQGTKLEIK

SEQ ID NO: 969 - protein, 107 aa, Artificial Sequence
  source: /note="Description of Artificial Sequence: Synthetic polypeptide"
DIQMTQSPSSLSASVGDRVTITCRASQDIYNYLNWYQQKPGKAVKLLIYYTSFLHSGVPSRFSGSGSGTDYTLTISSLQPEDFATYFCQQGDALPWTFGQGTKLEIK

SEQ ID NO: 970 - protein, 107 aa, Artificial Sequence
  source: /note="Description of Artificial Sequence: Synthetic polypeptide"
DIQMTQSPSSLSASVGDRVTITCRASQDIYNYLNWYQQKPGKAVKLLIYYTSILHSGVPSRFSGSGYGTDYTLTISSLQPEDFATYFCQQGDTLPWTFGQGTKLEIK

SEQ ID NO: 971 - protein, 118 aa, Artificial Sequence
  source: /note="Description of Artificial Sequence: Synthetic polypeptide"
EVQLVQSGAEVKKPGASVKVSCKASGYTFTRYDLHWVRQAPGQGLEWMGRIDPQNGGIKYAQKFQGRATLTVDTSTSTAYMELSRLRSDDTAVYYCARWDYGGYFDVWGQGTLVTVSS

SEQ ID NO: 972 - protein, 118 aa, Artificial Sequence
  source: /note="Description of Artificial Sequence: Synthetic polypeptide"
EVQLVQSGAEVKKPGASVKVSCKASGYTFTYYYMNWVRQAPGQGLEWMGRIDPISGGTKYAQKFQGRATLTVDTSTSTAYMELSRLRSDDTAVYYCARYDHGGYFDVWGQGTLVTVSS

SEQ ID NO: 973 - protein, 118 aa, Artificial Sequence
  source: /note="Description of Artificial Sequence: Synthetic polypeptide"
EVQLVQSGAEVKKPGASVKVSCKASGYTFTSYDLHWVRQAPGQGLEWMGRIDPQSGGIKYAQKFQGRATLTVDTSTSTAYMELSRLRSDDTAVYYCARWDYGGHFDVWGQGTLVTVSS

SEQ ID NO: 974 - protein, 118 aa, Artificial Sequence
  source: /note="Description of Artificial Sequence: Synthetic polypeptide"
EVQLVQSGAEVKKPGASVKVSCKASGYTFTSYDMHWVRQAPGQGLEWMGRIDPQTGGVRYAQKFQGRATLTVDTSTSTAYMELSRLRSDDTAVYYCARWDYGGYFDVWGQGTLVTVSS

SEQ ID NO: 975 - protein, 118 aa, Artificial Sequence
  source: /note="Description of Artificial Sequence: Synthetic polypeptide"
EVQLVQSGAEVKKPGASVKVSCKASGYTFTSYDLHWVRQAPGQGLEWMGRIDPQDGGIKYAQKFQGRATLTVDTSTSTAYMELSRLRSDDTAVYYCARWDYGGYFDVWGQGTLVTVSS

SEQ ID NO: 976 - protein, 118 aa, Artificial Sequence
  source: /note="Description of Artificial Sequence: Synthetic polypeptide"
EVQLVQSGAEVKKPGASVKVSCKASGYTFTAYDLHWVRQAPGQGLEWMGRIDPDDGGIRYAQKFQGRATLTVDTSTSTAYMELSRLRSDDTAVYYCARWDYGGYFDVWGQGTLVTVSS

SEQ ID NO: 977 - protein, 118 aa, Artificial Sequence; identical to SEQ ID NO: 935
  source: /note="Description of Artificial Sequence: Synthetic polypeptide"

SEQ ID NO: 978 - protein, 118 aa, Artificial Sequence
  source: /note="Description of Artificial Sequence: Synthetic polypeptide"
EVQLVQSGAEVKKPGASVKVSCKASGYTFTSYDMHWVRQAPGQGLEWMGRIDPQDGDVKYAQKFQGRATLTVDTSTSTAYMELSRLRSDDTAVYYCARWDYGGYFDVWGQGTLVTVSS

SEQ ID NO: 979 - protein, 118 aa, Artificial Sequence
  source: /note="Description of Artificial Sequence: Synthetic polypeptide"
EVQLVQSGAEVKKPGASVKVSCKASGYTFTSYDMHWVRQAPGQGLEWMGRIDPQTGDIKYAQKFQGRATLTVDTSTSTAYMELSRLRSDDTAVYYCARWDYGGQFDVWGQGTLVTVSS

SEQ ID NO: 980 - protein, 118 aa, Artificial Sequence
  source: /note="Description of Artificial Sequence: Synthetic polypeptide"
EVQLVQSGAEVKKPGASVKVSCKASGYTFTYYDMHWVRQAPGQGLEWMGRIDPQSGGIIYAQKFQGRATLTVDTSTSTAYMELSRLRSDDTAVYYCARWDYGGYFDVWGQGTLVTVSS

SEQ ID NO: 981 - protein, 118 aa, Artificial Sequence
  source: /note="Description of Artificial Sequence: Synthetic polypeptide"
EVQLVQSGAEVKKPGASVKVSCKASGYTFTSYDMHWVRQAPGQGLEWMGRIDPQSGGVRYAQKFQGRATLTVDTSTSTAYMELSRLRSDDTAVYYCARWDYGGYFDVWGQGTLVTVSS

SEQ ID NO: 982 - protein, 118 aa, Artificial Sequence
  source: /note="Description of Artificial Sequence: Synthetic polypeptide"
EVQLVQSGAEVKKPGASVKVSCKASGYTFTYYDMHWVRQAPGQGLEWMGRIDPQSGGDRYAQKFQGRATLTVDTSTSTAYMELSRLRSDDTAVYYCARWDYGGYFDVWGQGTLVTVSS

SEQ ID NO: 983 - protein, 118 aa, Artificial Sequence
  source: /note="Description of Artificial Sequence: Synthetic polypeptide"
EVQLVQSGAEVKKPGASVKVSCKASGYTFTSYDMHWVRQAPGQGLEWMGRIDPVSGGIKYAQKFQGRATLTVDTSTSTAYMELSRLRSDDTAVYYCARWDYGGYFDVWGQGTLVTVSS

SEQ ID NO: 984 - protein, 118 aa, Artificial Sequence
  source: /note="Description of Artificial Sequence: Synthetic polypeptide"
EVQLVQSGAEVKKPGASVKVSCKASGYTFTSYDMHWVRQAPGQGLEWMGRIDPYSGGIKYAQKFQGRATLTVDTSTSTAYMELSRLRSDDTTVYYCARWDYGGQFDVWGQGTLVTVSS

SEQ ID NO: 985 - protein, 118 aa, Artificial Sequence
  source: /note="Description of Artificial Sequence: Synthetic polypeptide"
EVQLVQSGAEVKKPGASVKVSCKASGYTFTYYDVHWVRQAPGQGLEWMGRIDPQSGGGRYAQKFQGRATLTVDTSTSTAYMELSRLRSDDTAVYYCARWDYGGYFDVWGQGTLVTVSS

SEQ ID NO: 986 - protein, 118 aa, Artificial Sequence
  source: /note="Description of Artificial Sequence: Synthetic polypeptide"
EVQLVQSGAEVKKPGASVKVSCKASGYTFTKYDMHWVRQAPGQGLEWMGRIDPQTGGVKYAQKFQGRATLTVDTSTSTAYMELSRLRSDDTAVYYCARWDYGGYFDVWGQGTLVTVSS

SEQ ID NO: 987 - protein, 118 aa, Artificial Sequence
  source: /note="Description of Artificial Sequence: Synthetic polypeptide"
EVQLVQSGAEVKKPGASVKVSCKASGYTFTSYWMQWVRQAPGQGLEWMGRIDPQDGDIKYAQKFQGRATLTVDTSTSTAYMELSRLRSDDTAVYYCARWDYGGYFDVWGQGTLVTVSS

SEQ ID NO: 988 - protein, 118 aa, Artificial Sequence
  source: /note="Description of Artificial Sequence: Synthetic polypeptide"
EVQLVQSGAEVKKPGASVKVSCKASGYTFTSYDMHWVRQAPGQGLEWMGRIDPESGGTKYAQKFQGRATLTVDTSTSTAYMELSRLRSDDTAVYYCARWDYGGYFDVWGQGTLVTVSS

SEQ ID NO: 989 - protein, 118 aa, Artificial Sequence
  source: /note="Description of Artificial Sequence: Synthetic polypeptide"
EVQLVQSGAEVKKPGASVKVSCKASGYTFTSYDMHWVRQAPGQGLEWMGRIDPQSGGIKYAQKFQGRATLTVDTSTSTAYMELSRLRSDDTAVYYCARWHTGGQFDVWGQGTLVTVSS

SEQ ID NO: 990 - protein, 118 aa, Artificial Sequence; identical to SEQ ID NO: 945
  source: /note="Description of Artificial Sequence: Synthetic polypeptide"

SEQ ID NO: 991 - protein, 118 aa, Artificial Sequence
  source: /note="Description of Artificial Sequence: Synthetic polypeptide"
EVQLVQSGAEVKKPGASVKVSCKASGYTFTRYDLHWVRQAPGQGLEWMGRIDPPSGGVLYAQKFQGRATLTVDTSTSTAYMELSRLRSDDTAVYYCARWDYGGYFDVWGQGTLVTVSS

SEQ ID NO: 992 - protein, 118 aa, Artificial Sequence
  source: /note="Description of Artificial Sequence: Synthetic polypeptide"
EVQLVQSGAEVKKPGASVKVSCKASGYTFTSYDMHWVRQAPGQGLGWMGRIDPQSGGIKYAQKFQGRATLTVDTSTSTAYMELSRLRSDDTAVYYCARWDYGGFFDVWGQGTLVTVSS

SEQ ID NO: 993 - protein, 118 aa, Artificial Sequence
  source: /note="Description of Artificial Sequence: Synthetic polypeptide"
EVQLVQSGAEVKKPGASVKVSCKASGYTFTQYDMHWVRQAPGQGLEWMGRIDPQSGGIKYAQKFQGRATLTVDTSTSTAYMELSRLRSDDTAVYYCARYDYGGYFDVWGQGTLVTVSS

SEQ ID NO: 994 - protein, 118 aa, Artificial Sequence
  source: /note="Description of Artificial Sequence: Synthetic polypeptide"
EVQLVQSGAEVKKPGASVKVSCKASGYTFTEYDMHWVRQAPGQGLEWMGRIDPQSGGQKYAQKFQGRATLTVDTSTSTAYMELSRLRSDDTAVYYCARWDYGGFFDVWGQGTLATVSS

SEQ ID NO: 995 - protein, 118 aa, Artificial Sequence
  source: /note="Description of Artificial Sequence: Synthetic polypeptide"
EVQLVQSGAEVKKPGASVKVSCKASGYTFTNYDMHWVRQAPGQGLEWMGRIDPQVGGIKYAQKFQGRATLTVDTSTSTAYMELSRLRSDDTAVYYCARWDYGGYFDVWGQGTLVTVSS

SEQ ID NO: 996 - protein, 118 aa, Artificial Sequence
  source: /note="Description of Artificial Sequence: Synthetic polypeptide"
EVQLVQSGAEVKKPGASVKVSCKASGYTFTHYFMNWVRQAPGQGLEWMGRIDPQSGSIRYAQKFQGRATLTVDTSTSTAYMELSRLRSDDTAVYYCARWDYGGYFDVWGQGTLVTVSS

SEQ ID NO: 997 - protein, 118 aa, Artificial Sequence
  source: /note="Description of Artificial Sequence: Synthetic polypeptide"
EVQLVQSGAEVKKPGASVKVSCKASGYTFTSYDMHWVRQAPGQGLEWMGRIDPNSGGIKYAQKFQGRATLTVDTSTSTAYMELSRLRSDDTAVYYCARWDYGGYFDVWGQGTLVTVSS

SEQ ID NO: 998 - protein, 118 aa, Artificial Sequence
  source: /note="Description of Artificial Sequence: Synthetic polypeptide"
EVQLVQSGAEVKKPGASVKVSCKASGYTFTYYDLHWVRQAPGQGLEWMGRIDPQSGGIKYAQKFQGRATLTVDTSTSTAYMELSRLRSDDTAVYYCARWDYGGYFDVWGQGTLVTVSS

SEQ ID NO: 999 - protein, 118 aa, Artificial Sequence
  source: /note="Description of Artificial Sequence: Synthetic polypeptide"
EVQLVQSGAEVKKPGASVKVSCKASGYTFTSYDMHWVRQAPGQGLEWMGRIDPQSGGQKYAQKFQGRATLTVDTSTSTAYMELSRLRSDDTAVYYCARWDYGGYFDVWGQGTLVTVSS

SEQ ID NO: 1000 - protein, 118 aa, Artificial Sequence
  source: /note="Description of Artificial Sequence: Synthetic polypeptide"
EVRLVQSGAEVKKPGASVKVSCKASGYTFTSYDMHWVRQAPGQGLEWMGRIDPQSGGVKYAQKFQGRATLTVDTSTSTAYMELSRLRSDDTAVYYCARWDYGGYFDVWGQGTLVTVSS

SEQ ID NO: 1001 - protein, 118 aa, Artificial Sequence
  source: /note="Description of Artificial Sequence: Synthetic polypeptide"
EVQLVQSGAEVKKPGASVKVSCKASGYTFTSYDTHWVRQAPGQGLEWMGRIDPQSGGIKYAQKFQGRATLTVDTSTSTAYMELSRLRSDDTAVYYCARWDYGGYFDVWGQGTLVTVSS

SEQ ID NO: 1002 - protein, 118 aa, Artificial Sequence; identical to SEQ ID NO: 922
  source: /note="Description of Artificial Sequence: Synthetic polypeptide"

SEQ ID NO: 1003 - protein, 118 aa, Artificial Sequence
  source: /note="Description of Artificial Sequence: Synthetic polypeptide"
EVQLVQSGAEVKKPGASVKVSCKASGYTFTQYDMHWVRQAPGQGLEWMGRIDPQWGGIKYAQKFQGRATLTVDTSTSTAYMELSRLRSDDTAVYYCARWDYGGYFDVWGQGTLVTVSS

SEQ ID NO: 1004 - protein, 118 aa, Artificial Sequence
  source: /note="Description of Artificial Sequence: Synthetic polypeptide"
EVQLVQSGAEVKKPGASVKVSCKASGYTFTLYDMHWVRQAPGQGLEWMGRIDPQSGGIKYAQKFQGRATLTVDTSTSTAYMELSRLRSDDTAVYYCARWDYGGYFDVWGQGTLVTVSS

SEQ ID NO: 1005 - protein, 118 aa, Artificial Sequence; identical to SEQ ID NO: 941
  source: /note="Description of Artificial Sequence: Synthetic polypeptide"

SEQ ID NO: 1006 - protein, 118 aa, Artificial Sequence
  source: /note="Description of Artificial Sequence: Synthetic polypeptide"
EVQLVQSGAEVKKPGASVKVSCKASGYTFTSYDMHWVRQAPGQGLEWMGRIDPQSGGIRYAQKFQGRATLTVDTSTSTAYMELSRLRSDDTAVYYCARYDYGGYFDVWGQGTLVTVSS

SEQ ID NO: 1007 - protein, 118 aa, Artificial Sequence
  source: /note="Description of Artificial Sequence: Synthetic polypeptide"
EVQLVQSGAEVKKPGASVKVSCKASGYTFTSYDIHWVRQAPGQGLEWMGRIDPQSGGIKYAQKFQGRATLTVDTSTSTAYMELSRLRSDDTAVYYCARWDYGGYFDVWGQGTLVTVSS

SEQ ID NO: 1008 - protein, 118 aa, Artificial Sequence; identical to SEQ ID NO: 922
  source: /note="Description of Artificial Sequence: Synthetic polypeptide"

SEQ ID NO: 1009 - protein, 118 aa, Artificial Sequence
  source: /note="Description of Artificial Sequence: Synthetic polypeptide"
EVQLVQSGAEVKKPGASVKVSCKASGYTFTRYDMHWVRQAPGQGLEWMGRIDPKSGGIKYAQKFQGRATLTVDTSTSTAYMELSRLRSDDTAVYYCARWDYGGYFDVWGQGTLVTVSS

SEQ ID NO: 1010 - protein, 107 aa, Artificial Sequence; identical to SEQ ID NO: 955
  source: /note="Description of Artificial Sequence: Synthetic polypeptide"

SEQ ID NO: 1011 - protein, 107 aa, Artificial Sequence
  source: /note="Description of Artificial Sequence: Synthetic polypeptide"
DIQMTQSPSSLSASVGDRVTITCRASQDIYNYLNWYQQKPGKAVKLLIYYTSGLHSGVPSRFSGSGSGTDYTLTISSLQPEDFATYFCQQGDTLPWTFGQGTKLEIK

SEQ ID NO: 1012 - protein, 107 aa, Artificial Sequence
  source: /note="Description of Artificial Sequence: Synthetic polypeptide"
DIQMTQSPSSLSASVGDRVTITCRASQDIYSYLNWYQQKPGKAVKLLIYYTSLLHSGVPSRFSGSGSGTDYTLTISSLQPEDFATYFCQQGDLLPWTFGQGTKLEIK

SEQ ID NO: 1013 - protein, 107 aa, Artificial Sequence; identical to SEQ ID NO: 954
  source: /note="Description of Artificial Sequence: Synthetic polypeptide"

SEQ ID NO: 1014 - protein, 107 aa, Artificial Sequence
  source: /note="Description of Artificial Sequence: Synthetic polypeptide"
DIQMTQSPSSLSASVGDRVTITCRASQDIFNYLNWYQQKPGKAVKLLIYYTSNLHSGVPSRFSGSGSGTDYTLTISSLQPEDFATYFCQQGDTLPWTFGQGTKLEIK

SEQ ID NO: 1015 - protein, 107 aa, Artificial Sequence; identical to SEQ ID NO: 966
  source: /note="Description of Artificial Sequence: Synthetic polypeptide"

SEQ ID NO: 1016 - protein, 107 aa, Artificial Sequence; identical to SEQ ID NO: 964
  source: /note="Description of Artificial Sequence: Synthetic polypeptide"

SEQ ID NO: 1017 - protein, 107 aa, Artificial Sequence; identical to SEQ ID NO: 962
  source: /note="Description of Artificial Sequence: Synthetic polypeptide"

SEQ ID NO: 1018 - protein, 107 aa, Artificial Sequence
  source: /note="Description of Artificial Sequence: Synthetic polypeptide"
DIQMTQSPSSLSASVGDRVTITCRASQDIYNYLNWYQQKPGKAVKLLIYYTSGLHSGVPSRFSGSGSGTDYTLTISSLQPEDFATYFCQQGDELPWTFGQGTKLEIK

SEQ ID NO: 1019 - protein, 107 aa, Artificial Sequence
  source: /note="Description of Artificial Sequence: Synthetic polypeptide"
DIQMTQSPSSLSASVGDRVTITCRASQDIFNYLNWYQQKPGKAVKLLIYYTSVLHSGVPSRFSGSGSGTDYTLTISSLQPEDFATYFCQQGDELPWTFGQGTKLEIK

SEQ ID NO: 1020 - protein, 107 aa, Artificial Sequence
  source: /note="Description of Artificial Sequence: Synthetic polypeptide"
DIQMTQSPSSLSASVGDRVTITCRASQDIYNYLNWYQQKPGKAVKLLIYYTSILHSGVPSRFSGSGSGTDYTLTISSLQPEDFATYFCQQGDALPWTFGQGTKLEIK

SEQ ID NO: 1021 - protein, 107 aa, Artificial Sequence
  source: /note="Description of Artificial Sequence: Synthetic polypeptide"
DIQMTQSPSSLSASVGDRVTITCRASQDIYHYLNWYQQKPGKAVKLLIYYTSELHSGVPSRFSGSGSGTDYTLTISSLQPEDFATYFCQQGDELPWTFGQGTKLEIK

SEQ ID NO: 1022 - protein, 107 aa, Artificial Sequence
  source: /note="Description of Artificial Sequence: Synthetic polypeptide"
DIQMTQSPSSLSASVGDRVTITCRASQDIFNYLNWYQQKPGKAVKLLIYYTSGLHSGVPSRFSGSGSGTDYTLTISSLQPEDFATYFCQQGDTLPWTFGQGTKLEIK

SEQ ID NO: 1023 - protein, 107 aa, Artificial Sequence
  source: /note="Description of Artificial Sequence: Synthetic polypeptide"
DIQMTQSPSSLSASVGDRVTITCRASQDIYNYLNWYQQKPGKAVKLLIYYTSILHSGVPSRFSGSGSGTDYTLTISSLQPEDFATYFCQQGDGLPWTFGQGTKLEIK

SEQ ID NO: 1024 - protein, 107 aa, Artificial Sequence; identical to SEQ ID NO: 630
  source: /note="Description of Artificial Sequence: Synthetic polypeptide"

SEQ ID NO: 1025 - protein, 107 aa, Artificial Sequence
  source: /note="Description of Artificial Sequence: Synthetic polypeptide"
DIQMTQSPSSLSASVGDRVTITCRASQDIYNYLNWYQQKPGKAVKLLIYYTSLLHSGVPSRFSGSGSGTDYTLTISSLQPEDFATYFCQQGDTLPWTFGQGTKLDIK

SEQ ID NO: 1026 - protein, 107 aa, Artificial Sequence
  source: /note="Description of Artificial Sequence: Synthetic polypeptide"
DIQMTQSPSSLSASVGDRVTITCRASQDIYNYLNWYQQKPGKAVKLLIYYTSILHSGVPSRFSGSGSGTDYTLTISSLQPEDFATYFCQQGDTLPWTFGQGTKLEIK

SEQ ID NO: 1027 - protein, 107 aa, Artificial Sequence
  source: /note="Description of Artificial Sequence: Synthetic polypeptide"
DIQMTQSPSSLSASVGDRVTITCRASQDIYKYLNWYQQKPGKAVKLLIYYTSRLHSGVPSRFSGSGSGTDYTLTISSLQPEDFATYFCQQGDELPWTFGQGTKLEIK

SEQ ID NO: 1028 - protein, 107 aa, Artificial Sequence; identical to SEQ ID NO: 781
  source: /note="Description of Artificial Sequence: Synthetic polypeptide"

SEQ ID NO: 1029 - protein, 107 aa, Artificial Sequence
  source: /note="Description of Artificial Sequence: Synthetic polypeptide"
DIQMTQSPSSLSASVGDRVTITCRASQDIFNYLNWYQQKPGKAVKLLIYYTSSLHSGVPSRFSGSGSGTDYTLTISSLQPEDFATYFCQQGDGLPWTFGQGTKLEIK

SEQ ID NO: 1030 - protein, 107 aa, Artificial Sequence
  source: /note="Description of Artificial Sequence: Synthetic polypeptide"
DIQMTQSPSSLSASVGDRVTITCRASQDIYNYLNWYQQKPGKAVKLLIYYTSYLHSGVPSRFSGSGSGTDYTLTISSLQPEDFATYFCQQGDTLPWTFGQGTKLEIK

SEQ ID NO: 1031 - protein, 107 aa, Artificial Sequence
  source: /note="Description of Artificial Sequence: Synthetic polypeptide"
DIQMTQSPSSLSASVGDRVTITCRASQDIYNYLNWYQQKPGKAVKLLIYYTSELHSGVPSRFSGSGSGTDYTLTISSLQPEDFATYFCQQGDTLPWTFGQGTKLEIK

SEQ ID NO: 1032 - protein, 107 aa, Artificial Sequence
  source: /note="Description of Artificial Sequence: Synthetic polypeptide"
DIQMTQSPSSLSASVGDRVTITCRASQDIYKYLNWYQQKPGKAVKLLIYYTSHLHSGVPSRFSGSGSGTDYTLTISSLQPEDFATYFCQQGDTLPWTFGQGTKLEIK

SEQ ID NO: 1033 - protein, 107 aa, Artificial Sequence
  source: /note="Description of Artificial Sequence: Synthetic polypeptide"
DIQMTQSPSSLSASVGDRVTITCRASQDIFNYLNWYQQKPGKAVKLLIYYTSRLHSGVPSRFSGSGSGTDYTLTISSLQPEDFATYFCQQGDELPWTFGQGTKLEIK

SEQ ID NO: 1034 - protein, 107 aa, Artificial Sequence
  source: /note="Description of Artificial Sequence: Synthetic polypeptide"
DIQMTQSPSSLSASVGDRVTITCRASQDIYNYLNWYQQKPGKAVKLLIYYTSRLHSGVPSRFSGSGSGTDYTLTISSLQPEDFATYFCQQGDDIPWTFGQGTKLEIK

SEQ ID NO: 1035 - protein, 107 aa, Artificial Sequence
  source: /note="Description of Artificial Sequence: Synthetic polypeptide"
DIQMTQSPSSLSASVGDRVTITCRASQDIYNYLNWYQQKPGKAVKLLIYYTSRLHSGVPSRFSGSGSGTDYTLTISSLQPEDFATYFCQQGDELPWTFGQGTKLEIK

SEQ ID NO: 1036 - protein, 107 aa, Artificial Sequence; identical to SEQ ID NO: 163
  source: /note="Description of Artificial Sequence: Synthetic polypeptide"

SEQ ID NO: 1037 - protein, 118 aa, Artificial Sequence
  source: /note="Description of Artificial Sequence: Synthetic polypeptide"
EVQLVQSGAEVKKPGASVKVSCKASGYTFTSYDMHWVRQAPGQGLEWMGRIDPQSGDIKYAQKFQGRATLTVDTSTSTAYMELSRLRSDDTAVYYCARYDHGGYFDVWGQGTLVTVSS

SEQ ID NO: 1038 - protein, 118 aa, Artificial Sequence
  source: /note="Description of Artificial Sequence: Synthetic polypeptide"
EVQLVQSGAEVKKPGASVKVSCKASGYTFTKYDIHWVRQAPGQGLEWMGRIDPQSGPIKYAQKFQGRATLTVDTSTSTAYMELSRLRSDDTAVYYCARWDYGGYFDVWGQGTLVTVSS

SEQ ID NO: 1039 - protein, 118 aa, Artificial Sequence
  source: /note="Description of Artificial Sequence: Synthetic polypeptide"
EVQLVQSGAEVKKPGASVKVSCKASGYTFTSYDMHWVRQAPGQGLEWMGRIDPQSGGIKYAQKFQGRATLTVDTSTSTAYMELSRLRSDDTAVYYCARWSQGGYFDVWGQGTLVTVSS

SEQ ID NO: 1040 - protein, 118 aa, Artificial Sequence
  source: /note="Description of Artificial Sequence: Synthetic polypeptide"
EVQLVQSGAEVKKPGASVKVSCKASGYTFTSYDMHWVRQAPGQGLEWMGRIDPQSGGIKYAQKFQGRATLTVDTSTSTAYMELSRLRSDDTAVYYCARYDHGGYFDVWGQGTLVTVSS

SEQ ID NO: 1041 - protein, 118 aa, Artificial Sequence
  source: /note="Description of Artificial Sequence: Synthetic polypeptide"
EVQLVQSGAEVKKPGASVKVSCKASGYTFTQYDMHWVRQAPGQGLEWMGRIDPANGGIKYAQKFQGRATLTVDTSTSTAYMELSRLRSDDTAVYYCARYDYGGYFDVWGQGTLVTVSS

SEQ ID NO: 1042 - protein, 118 aa, Artificial Sequence
  source: /note="Description of Artificial Sequence: Synthetic polypeptide"
EVQLVQSGAEVKKPGASVKVSCKASGYTFTYYDLHWVRQAPGQGLEWMGRIDPLSGGGVYAQKFQGRATLTVDTSTSTAYMELSRLRSDDTAVYYCARYDHGGYFDVWGQGTLVTVSS

SEQ ID NO: 1043 - protein, 118 aa, Artificial Sequence
  source: /note="Description of Artificial Sequence: Synthetic polypeptide"
EVQLVQSGAEVKKPGASVKVSCKASGYTFTFYDIHWVRQAPGQGLEWMGRIDPQSGGIKYAQKFQGRATLTVDTSTSTAYMELSRLRSDDTAVYYCARWDYGGYFDVWGQGTLVTVSS

SEQ ID NO: 1044 - protein, 118 aa, Artificial Sequence
  source: /note="Description of Artificial Sequence: Synthetic polypeptide"
EVQLVQSGAEVKKPGASVKVSCKASGYTFTSYDLHWVRQAPGQGLEWMGRIDPQSGGHKYAQKFQGRATLTVDTSTSTAYMELSRLRSDDTAVYYCARYDFGGYFDVWGQGTLVTVSS

SEQ ID NO: 1045 - protein, 118 aa, Artificial Sequence
  source: /note="Description of Artificial Sequence: Synthetic polypeptide"
EVQLVQSGAEVKKPGASVKVSCKASGYTFTSYDIHWVRQAPGQGLEWMGRIDPYSGGIKYAQKFQGRATLTVDTSTSTAYMELSRLRSDDTAVYYCARWDYGGYFDVWGQGTLVTVSS

SEQ ID NO: 1046 - protein, 118 aa, Artificial Sequence
  source: /note="Description of Artificial Sequence: Synthetic polypeptide"
EVQLVQSGAEVKKPGASVKVSCKASGYTFTSYWMHWVRQAPGQGLEWMGRIDPQSGGIVYAQKFQGRATLTVDTSTSTAYMELSRLRSDDTAVYYCARWDYGGYFDVWGQGTLVTVSS

SEQ ID NO: 1047 - protein, 118 aa, Artificial Sequence
  source: /note="Description of Artificial Sequence: Synthetic polypeptide"
EVQLVQSGAEVKKPGASVKVSCKASGYTFTIYDMHWVRQAPGQGLEWMGRIDPQSGGIKYAQKFQGRATLTVDTSTSTAYMELSRLRSDDTAVYYCARWEYGGYFDVWGQGTLVTVSS

SEQ ID NO: 1048 - protein, 118 aa, Artificial Sequence
  source: /note="Description of Artificial Sequence: Synthetic polypeptide"
EVQLVQSGAEVKKPGASVKVSCKASGYTFTSYDLHWVRQAPGQGLEWMGRIDPQSGGIKYAQKFQGRATLTVDTSTSTAYMELSRLRSDDTAVYYCARWDQGGYFDVWGQGTLVTVSS

SEQ ID NO: 1049 - protein, 118 aa, Artificial Sequence
  source: /note="Description of Artificial Sequence: Synthetic polypeptide"
EVQLVQSGAEVKKPGASVKVSCKASGYTFTSYDINWVRQAPGQGLEWMGRIDPQSGDYKYAQKFQGRATLTVDTSTSTAYMELSRLRSDDTAVYYCARYDHGGYFDVWGQGTLVTVSS

SEQ ID NO: 1050 - protein, 118 aa, Artificial Sequence
  source: /note="Description of Artificial Sequence: Synthetic polypeptide"
EVQLVQSGAEVKKPGASVKVSCKASGYTFTSYDMHWVRQAPGQGLEWMGRIDPQSGGEKYAQKFQGRATLTVDTSTSTAYMELSRLRSDDTAVYYCARYDYGGYFDVWGQGTLVTVSS

SEQ ID NO: 1051 - protein, 118 aa, Artificial Sequence
  source: /note="Description of Artificial Sequence: Synthetic polypeptide"
EVQLVQSGAEVKKPGASVKVSCKASGYTFTSYDMHWVRQAPGQGLEWMGRIDPQTGGIKYAQKFQGRATLTVDTSTSTAYMELSRLRSDDTAVYYCARYDHGGYFDVWGQGTLVTVSS

SEQ ID NO: 1052 - protein, 118 aa, Artificial Sequence
  source: /note="Description of Artificial Sequence: Synthetic polypeptide"
EVQLVQSGAEVKKPGASVKVSCKASGYTFTSYPLHWVRQAPGQGLEWMGRIDPQSGGDIYAQKFQGRATLTVDTSTSTAYMELSRLRSDDTAVYYCARWDYGGYFDVWGQGTLVTVSS

SEQ ID NO: 1053 - protein, 118 aa, Artificial Sequence
  source: /note="Description of Artificial Sequence: Synthetic polypeptide"
EVQLVQSGAEVKKPGASVKVSCKASGYTFTSYWMHWVRQAPGQGLEWMGRIDPQNGGIKYAQKFQGRATLTVDTSTSTAYMELSRLRSDDTAVYYCARWDYGGYFDVWGQGTLVTVSS

SEQ ID NO: 1054 - protein, 118 aa, Artificial Sequence
  source: /note="Description of Artificial Sequence: Synthetic polypeptide"
EVQLVQSGAEVKKPGASVKVSCKASGYTFTSYLLQWVRQAPGQGLEWMGRIDPTSGGDDYAQKFQGRATLTVDTSTSTAYMELSRLRSDDTAVYYCARWDYGGYFDVWGQGTLVTVSS

SEQ ID NO: 1055 - protein, 118 aa, Artificial Sequence
  source: /note="Description of Artificial Sequence: Synthetic polypeptide"
EVQLVQSGAEVKKPGASVKVSCKASGYTFTLYDVHWVRQAPGQGLEWMGRIDPQSGGDKYAQKFQGRATLTVDTSTSTAYMELSRLRSDDTAVYYCARYDYGGYFDVWGQGTLVTVSS

SEQ ID NO: 1056 - protein, 118 aa, Artificial Sequence
  source: /note="Description of Artificial Sequence: Synthetic polypeptide"
EVQLVQSGAEVKKPGASVKVSCKASGYTFTSYDIHWVRQAPGQGLEWMGRIDPQSGGVKYAQKFQGRATLTVDTSTSTAYMELSRLRSDDTAVYYCARYDYGGYFDVWGQGTLVTVSS

SEQ ID NO: 1057 - protein, 118 aa, Artificial Sequence
  source: /note="Description of Artificial Sequence: Synthetic polypeptide"
EVQLVQSGAEVKKPGASVKVSCKASGYTFTSYDMHWVRQAPGQGLEWMGRIDPQSGGSKYAQKFQGRATLTVDTSTSTAYMELSRLRSDDTAVYYCARYDYGGYFDVWGQGTLVTVSS

SEQ ID NO: 1058 - protein, 118 aa, Artificial Sequence
  source: /note="Description of Artificial Sequence: Synthetic polypeptide"
EVQLVQSGAEVKKPGASVKVSCKASGYTFTSYDISWVRQAPGQGLEWMGRIDPQSGGIKYAQKFQGRATLTVDTSTSTAYMELSRLRSDDTAVYYCARWDYGGYFDVWGQGTLVTVSS

SEQ ID NO: 1059 - protein, 118 aa, Artificial Sequence
  source: /note="Description of Artificial Sequence: Synthetic polypeptide"
EVQLVQSGAEVKKPGASVKVSCKASGYTFTSYDMSWVRQAPGQGLEWMGRIDPQGGGTRYAQKFQGRATLTVDTSTSTAYMELSRLRSDDTAVYYCARWDYAGYFDVWGQGTLVTVSS

SEQ ID NO: 1060 - protein, 118 aa, Artificial Sequence
  source: /note="Description of Artificial Sequence: Synthetic polypeptide"
EVQLVQSGAEVKKPGASVKVSCKASGYTFTSYDMHWVRQAPGQGLEWMGRIDPQTGGIKYAQKFQGRATLTVDTSTSTAYMELSRLRSDDTAVYYCARWDHGGYFDVWGQGTLVTVSS

SEQ ID NO: 1061 - protein, 118 aa, Artificial Sequence
  source: /note="Description of Artificial Sequence: Synthetic polypeptide"
EVQLVQSGAEVKKPGASVKVSCKASGYTFTSYDMHWVRQAPGQGLEWMGRIDPDNGGTKYAQKFQGRATLTVDTSTSTAYMELSRLRSDDTAVYYCARYDHGGYFDVWGQGTLVTVSS

SEQ ID NO: 1062 - protein, 118 aa, Artificial Sequence
  source: /note="Description of Artificial Sequence: Synthetic polypeptide"
EVQLVQSGAEVKKPGASVKVSCKASGYTFTSYDVHWVRQAPGQGLEWMGRIDPQSGGILYAQKFQGRATLTVDTSTSTAYMELSRLRSDDTAVYYCARWEYGGNFDVWGQGTLVTVSS

SEQ ID NO: 1063 - protein, 118 aa, Artificial Sequence
  source: /note="Description of Artificial Sequence: Synthetic polypeptide"
EVQLVQSGAEVKKPGASVKVSCKASGYTFTHYDSHWVRQAPGQGLEWMGRIDPQSGGIKYAQKFQGRATLTVDTSTSTAYMELSRLRSDDTAVYYCARYDYGGYFDVWGQGTLVTVSS

SEQ ID NO: 1064 - protein, 118 aa, Artificial Sequence
  source: /note="Description of Artificial Sequence: Synthetic polypeptide"
EVQLVQSGAEVKKPGASVKVSCKASGYTFTNYDIHWVRQAPGQGLEWMGRIDPPSGGTKYAQKFQGRATLTVDTSTSTAYMELSRLRSDDTAVYYCARYDHGGYFDVWGQGTLVTVSS

SEQ ID NO: 1065 - protein, 118 aa, Artificial Sequence
  source: /note="Description of Artificial Sequence: Synthetic polypeptide"
EVQLVQSGAEVKKPGASVKVSCKASGYTFTSYDMHWVRQAPGQGLEWMGRIDPQSGGTKYAQKFQGRATLTVDTSTSTAYMELSRLRSDDTAVYYCARYDHGGYFDVWGQGTLVTVSS

SEQ ID NO: 1066 - protein, 118 aa, Artificial Sequence
  source: /note="Description of Artificial Sequence: Synthetic polypeptide"
EVQLVQSGAEVKKPGASVKVSCKASGYTFTTYWMHWVRQAPGQGLEWMGRIDPQSGGSKYAQKFQGRATLTVDTSTSTAYMELSRLRSDDTAVYYCARWDYGGYFDVWGQGTLVTVSS

SEQ ID NO: 1067 - protein, 118 aa, Artificial Sequence; identical to SEQ ID NO: 1007
  source: /note="Description of Artificial Sequence: Synthetic polypeptide"

SEQ ID NO: 1068 - protein, 107 aa, Artificial Sequence; identical to SEQ ID NO: 955
  source: /note="Description of Artificial Sequence: Synthetic polypeptide"

SEQ ID NO: 1069 - protein, 107 aa, Artificial Sequence
  source: /note="Description of Artificial Sequence: Synthetic polypeptide"
DIQMTQSPSSLSASVGDRVTITCRASQDIYNYLNWYQQKPGKAVKLLIYYTSNLHSGVPSRFSGSGSGTDYTLTISSLQPEDFATYFCQQGDTLPWTFGQGTKLEIK

SEQ ID NO: 1070 - protein, 107 aa, Artificial Sequence; identical to SEQ ID NO: 333
  source: /note="Description of Artificial Sequence: Synthetic polypeptide"

SEQ ID NO: 1071 - protein, 107 aa, Artificial Sequence
  source: /note="Description of Artificial Sequence: Synthetic polypeptide"
DIQMTQSPSSLSASVGDRVTITCGASQDIYNYLNWYQQKPGKAVKLLIYYTSRLHSGVPSRFSGSGSGTDYTLTISSLQPEDFATYFCQQGDTLPWTFGQGTKLEIK

SEQ ID NO: 1072 - protein, 107 aa, Artificial Sequence
  source: /note="Description of Artificial Sequence: Synthetic polypeptide"
DIQMTQSPSSLSASVGDRVTITCRASQDITSYLNWYQQKPGKAVKLLIYYTSNLHSGVPSRFSGSGSGTDYTLTISSLQPEDFATYFCQQGDTLPWTFGQGTKLEIK

SEQ ID NO: 1073 - protein, 107 aa, Artificial Sequence; identical to SEQ ID NO: 163
  source: /note="Description of Artificial Sequence: Synthetic polypeptide"

SEQ ID NO: 1074 - protein, 107 aa, Artificial Sequence
  source: /note="Description of Artificial Sequence: Synthetic polypeptide"
DIQMTQSPSSLSASVGDRVTITCRASQDIFQYLNWYQQKPGKAVKLLIYYTSKLHSGVPSRFSGSGSGTDYTLTISSLQPEDFATYFCQQGDTLPWTFGQGTKLEIK

SEQ ID NO: 1075 - protein, 107 aa, Artificial Sequence
  source: /note="Description of Artificial Sequence: Synthetic polypeptide"
DIQMTQSPSSLSASVGDRVTITCRASQDIYNYLNWYQQKPGKAVKLLIYYTSALHSGVPSRFSGSGSGTDYTLTINSLQPEDFATYFCQQGDTLPWTFGQGTKLEIK

SEQ ID NO: 1076 - protein, 107 aa, Artificial Sequence; identical to SEQ ID NO: 1030
  source: /note="Description of Artificial Sequence: Synthetic polypeptide"

SEQ ID NO: 1077 - protein, 107 aa, Artificial Sequence; identical to SEQ ID NO: 957
  source: /note="Description of Artificial Sequence: Synthetic polypeptide"

SEQ ID NO: 1078 - protein, 107 aa, Artificial Sequence; identical to SEQ ID NO: 966
  source: /note="Description of Artificial Sequence: Synthetic polypeptide"

SEQ ID NO: 1079 - protein, 107 aa, Artificial Sequence
  source: /note="Description of Artificial Sequence: Synthetic polypeptide"
DIQMTQSPSSLSASVGDRVTITCRASQDIYYYLNWYQQKPGKAVKLLIYYTSELHSGVPSRFSGSGSGTDYTLTISSLQPEDFATYFCQQGDTLPWTFGQGTKLEIK

SEQ ID NO: 1080 - protein, 107 aa, Artificial Sequence
  source: /note="Description of Artificial Sequence: Synthetic polypeptide"
DIQMTQSPSSLSASVGDRVTITCRASQDIYEYLNWYQQKPGKAVKLLIYYTSRLHSGVPSRFSGSGSGTDYTLTISSLQPEDFATYFCQQGDTLPWTFGQGTKLEIK

SEQ ID NO: 1081 - protein, 107 aa, Artificial Sequence
  source: /note="Description of Artificial Sequence: Synthetic polypeptide"
DIQMTQSPSSLSASVGDRVTITCRASQDIYYYLNWYQQKPGKAVKLLIYYTSRLHSGVPSRFSGSGSGTDYTLTISSLQPEDFATYFCQQGDTLPWTFGQGTKLEIK

SEQ ID NO: 1082 - protein, 107 aa, Artificial Sequence
  source: /note="Description of Artificial Sequence: Synthetic polypeptide"
DIQMTQSPSSLSASVGDRVTITCRASQDIYNYLNWYQQKPGKAVKLLIYYTSRLHSGVPSRFSGSGSGTDYTLTISSLQPEDFATYFCQQGDTPPWTFGQGTKLEIK

SEQ ID NO: 1083 - protein, 107 aa, Artificial Sequence; identical to SEQ ID NO: 840
  source: /note="Description of Artificial Sequence: Synthetic polypeptide"

SEQ ID NO: 1084 - protein, 107 aa, Artificial Sequence
  source: /note="Description of Artificial Sequence: Synthetic polypeptide"
DIQMTQSPSSLSASVGDRVTITCRASQDIYNYLNWYQQKPGKAVKLLIYYTSRLHSGVPSRFSGSGSGTDYTLTISSLQPEDFATYFCQQGDTQPWTFGQGTKLEIK

SEQ ID NO: 1085 - protein, 107 aa, Artificial Sequence
  source: /note="Description of Artificial Sequence: Synthetic polypeptide"
DIQMTQSPSSLSVSVGDRVTITCGASQDIFNYLNWYQQKPGKAVKLLIYYTSRLHSGVPSRFSGSGSGTDYTLTISSLQPEDFATYFCQQGDGLPWTFGQGTKLEIK

SEQ ID NO: 1086 - protein, 107 aa, Artificial Sequence
  source: /note="Description of Artificial Sequence: Synthetic polypeptide"
DIQMTQSPSSLSASVGDRVTITCRASQDIFHYLNWYQQKPGKAVKLLIYYTSILHSGVPSRFSGSGSGTDYTLTISSLQPEDFATYFCQQGDTLPWTFGQGTKLEIK

SEQ ID NO: 1087 - protein, 107 aa, Artificial Sequence
  source: /note="Description of Artificial Sequence: Synthetic polypeptide"
DIQMTQSPSSLSASVGDRVTITCRASQDIYNYLNWYQQKPGKAVKLLIYYTSRLHSGVPSRFSGSGSGTDYTLTISSLQPEDFATYFCQQGDDLPWTFGQGTKLEIK

SEQ ID NO: 1088 - protein, 107 aa, Artificial Sequence
  source: /note="Description of Artificial Sequence: Synthetic polypeptide"
DIQMTQSPSSLSASVGDRVTITCRASQDIYNYLNWYQQKPGKAVKLLIYYTSHLHSGVPSRFSGSGSGTDYTLTISSLQPEDFATYFCQQGDTLPWTFGQGTKLEIK

SEQ ID NO: 1089 - protein, 118 aa, Artificial Sequence
  source: /note="Description of Artificial Sequence: Synthetic polypeptide"
EVQLVQSGAEVKKPGASVKVSCKASGYTFTSYDMHWVRQAPGQGLEWMGRIDPQGGSVKYAQKFQGRATLTVDTSTSTAYMELSRLRSDDTAVYYCARWDHGGNFDVWGQGTLVTVSS

SEQ ID NO: 1090 - protein, 118 aa, Artificial Sequence
  source: /note="Description of Artificial Sequence: Synthetic polypeptide"
EVQLVQSGAEVKKPGASVKVSCKASGYTFTSYQVHWVRQAPGQGLEWMGRIDPQSGGIKYAQKFQGRATLTVDTSTSTAYMELSRLRSDDTAVYYCARWDYGGYFDVWGQGTLVTVSS

SEQ ID NO: 1091 - protein, 118 aa, Artificial Sequence
  source: /note="Description of Artificial Sequence: Synthetic polypeptide"
EVQLVQSGAEVKKPGASVKVSCKASGYTFTDYDMHWVRQAPGQGLEWMGRIDPVSGSIRYAQKFQGRATLTVDTSTSTAYMELSRLRSDDTAVYYCARYDHGGYFDVWGQGTLVTVSS

SEQ ID NO: 1092 - protein, 118 aa, Artificial Sequence; identical to SEQ ID NO: 922
  source: /note="Description of Artificial Sequence: Synthetic polypeptide"

SEQ ID NO: 1093 - protein, 118 aa, Artificial Sequence
  source: /note="Description of Artificial Sequence: Synthetic polypeptide"
EVQLVQSGAEVKKPGASVKVSCKASGYTFTSYEIVWVRQAPGQGLEWMGRIDPQSGDIAYAQKFQGRATLTVDTSTSTAYMELSRLRSDDTAVYYCARWDHGGYFDVWGQGTLVTVSS

SEQ ID NO: 1094 - protein, 118 aa, Artificial Sequence
  source: /note="Description of Artificial Sequence: Synthetic polypeptide"
EVQLVQSGAEVKKPGASVKVSCKASGYTFTRYDLHWVRQAPGQGLEWMGWIDPKSGSLKYAQKFQGRATLTVDTSTSTAYMELSRLRSDDTAVYYCARWDYGGYFDVWGQGTLVTVSS

SEQ ID NO: 1095 - protein, 118 aa, Artificial Sequence
  source: /note="Description of Artificial Sequence: Synthetic polypeptide"
EVQLVQSGAEVKKPGASVKVSCKASGYTFTTYWMHWVRQAPGQGLEWMGRIDPQRGDIKYAQKFQGRATLTVDTSTSTAYMELSRLRSDDTAVYYCARWDYGGFFDVWGQGTLVTVSS

SEQ ID NO: 1096 - protein, 118 aa, Artificial Sequence
  source: /note="Description of Artificial Sequence: Synthetic polypeptide"
EVQLVQSGAEVKKPGASVKVSCKASGYTFTSYWLHWVRQAPGQGLEWMGRIDPQSGGIIYAQKFQGRATLTVDTSTSTAYMELSRLRSDDTAVYYCARWDYGGYFDVWGQGTLVTVSS

SEQ ID NO: 1097 - protein, 118 aa, Artificial Sequence
  source: /note="Description of Artificial Sequence: Synthetic polypeptide"
EVQLVQSGAEVKKPGASVKVSCKASGYTFTDYDMHWVRQAPGQGLEWMGRIDPQSGDHDYAQKFQGRATLTVDTSTSTAYMELSRLRSDDTAVYYCARYDHGGYFDVWGQGTLVTVSS

SEQ ID NO: 1098 - protein, 118 aa, Artificial Sequence
  source: /note="Description of Artificial Sequence: Synthetic polypeptide"
EVQLVQSGAEVKKPGASVKVSCKASGYTFTSYDMHWVRQAPGQGLEWMGRIDPQSGGHKYAQKFQGRATLTVDTSTSTAYMELSRLRSDDTAVYYCARYDHGGYFDVWGQGTLVTVSS

SEQ ID NO: 1099 - protein, 118 aa, Artificial Sequence
  source: /note="Description of Artificial Sequence: Synthetic polypeptide"
EVQLVQSGAEVKKPGASVKVSCKASGYTFTSYDMQWVRQAPGQGLEWMGRIDPISGSIKYAQKFQGRATLTVDTSTSTAYMELSRLRSDDTAVYYCARYDHGGYFDVWGQGTLVTVSS

SEQ ID NO: 1100 - protein, 118 aa, Artificial Sequence
  source: /note="Description of Artificial Sequence: Synthetic polypeptide"
EVQLVQSGAEVKKPGASVKVSCKASGYTFTSYEMQWVRQAPGQGLEWMGRIDPQSGSIKYAQKFQGRATLTVDTSTSTAYMELSRLRSDDTAVYYCARWDYGGYFDVWGQGTLVTVSS

SEQ ID NO: 1101 - protein, 118 aa, Artificial Sequence
  source: /note="Description of Artificial Sequence: Synthetic polypeptide"
EVQLVQSGAEVKKPGASVKVSCKASGYTFTGYDLHWVRQAPGQGLEWMGRIDPQSGDDRYAQKFQGRATLTVDTSTSTAYMELSRLRSDDTAVYYCARWDEGGLFDVWGQGTLVTVSS

SEQ ID NO: 1102 - protein, 118 aa, Artificial Sequence
  source: /note="Description of Artificial Sequence: Synthetic polypeptide"
EVQLVQSGAEVKKPGASVKVSCKASGYTFTSYDMHWVRQAPGQGLEWMGRIDPYGGGIKYAQKFQGRATLTVDTSTSTAYMELSRLRSDDTAVYYCARYDHGGYFDVWGQGTLVTVSS

SEQ ID NO: 1103 - protein, 117 aa, Artificial Sequence
  source: /note="Description of Artificial Sequence: Synthetic polypeptide"
EVQLVQSGAEVKKPGASVKVSCKASGYTFTSYDMHWVRQAPGQGLEWMGRIDPQGGNYYAQKFQGRATLTVDTSTSTAYMELSRLRSDDTAVYYCARWDYGGYFDVWGQGTLVTVSS

SEQ ID NO: 1104 - protein, 118 aa, Artificial Sequence
  source: /note="Description of Artificial Sequence: Synthetic polypeptide"
EVQLVQSGAEVKKPGASVKVSCKASGYTFTSYDMHWVRQAPGQGLEWMGRIDPDSGGIKYAQKFQGRATLTVDTSTSTAYMELSRLRSDDTAVYYCARWDYSGYFDVWGQGTLVTVSS

SEQ ID NO: 1105 - protein, 118 aa, Artificial Sequence
  source: /note="Description of Artificial Sequence: Synthetic polypeptide"
EVQLVQSGAEVKKPGASVKVSCKASGYTFTSYFMSWVRQAPGQGLEWMGRIDPQSGGIKYAQKFQGRATLTVDTSTSTAYMELSRLRSDDTAVYYCARWDYAGYFDVWGQGTLVTVSS

SEQ ID NO: 1106 - protein, 118 aa, Artificial Sequence; identical to SEQ ID NO: 1040
  source: /note="Description of Artificial Sequence: Synthetic polypeptide"

SEQ ID NO: 1107 - protein, 118 aa, Artificial Sequence
  source: /note="Description of Artificial Sequence: Synthetic polypeptide"
EVQLVQSGAEVKKPGASVKVSCKASGYTFTAYDLHWVRQAPGQGLEWMGRIDPQSGGIKYAQKFQGRATLTVDTSTSTAYMELSRLRSDDTAVYYCARWDQGGYFDVWAQGTLVTVSS

SEQ ID NO: 1108 - protein, 118 aa, Artificial Sequence
  source: /note="Description of Artificial Sequence: Synthetic polypeptide"
EVQLVQSGAEVKKPGASVKVSCKASGYTFTPYQMHWVRQAPGQGLEWMGRIDPQSGGIPYAQKFQGRATLTVDTSTSTAYMELSRLRSDDTAVYYCARWDYGGYFDVWGQGTLVTVSS

SEQ ID NO: 1109 - protein, 118 aa, Artificial Sequence
  source: /note="Description of Artificial Sequence: Synthetic polypeptide"
EAQLVQSGAEVKKPGASVKVSCKASGYTFTSYWMHWVRQAPGQGLEWMGRIDPQSGGIKYAQKFQGRATLTVDTSTSTAYMELSRLRSDDTAVYYCARWDYGGYFDVWGQGTLVTVSS

SEQ ID NO: 1110 - protein, 118 aa, Artificial Sequence
  source: /note="Description of Artificial Sequence: Synthetic polypeptide"
EVQLVQSGAEVKKPGASVKVSCKASGYTFTSYDLHWVRQAPGQGLEWMGRIDPQSGGIKYAQKFQGRATLTVDTSTSTAYMELSRLRSDDTAVYYCARYDQGGYFDVWGQGTLVTVSS

SEQ ID NO: 1111 - protein, 118 aa, Artificial Sequence
  source: /note="Description of Artificial Sequence: Synthetic polypeptide"
EVQLVQSGAEVKKPGASVKVSCKASGYTFTSYDMHWVRQAPGQGLEWMGRIDPQSGGIIYAQKFQGRATLTVDTSTSTAYMELSRLRSDDTAVYYCARYDHGGYFDVWGQGTLVTVSS

SEQ ID NO: 1112 - protein, 118 aa, Artificial Sequence
  source: /note="Description of Artificial Sequence: Synthetic polypeptide"
EVQLVQSGAEVKKPGASVKVSCKASGYTFTNYWMHWVRQAPGQGLEWMGRIDPQSGGIKYAQKFQGRATLTVDTSTSTAYMELSRLRSDDTAVYYCARWDYGGYFDVWGQGTLVTVSS

SEQ ID NO: 1113 - protein, 118 aa, Artificial Sequence
  source: /note="Description of Artificial Sequence: Synthetic polypeptide"
EVQLVQSGAEVKKPGASVKVSCKASGYTFTHYDMHWVRQAPGQGLEWMGRIDPQSGGHKYAQKFQGRATLTVDTSTSTAYMELSRLRSDDTAVYYCARWDHGGYFDVWGQGTLVTVSS

SEQ ID NO: 1114 - protein, 107 aa, Artificial Sequence
  source: /note="Description of Artificial Sequence: Synthetic polypeptide"
DIQMTQSPSSLSASVGDRVTITCRASQDIYSYLNWYQQKPGKAVKLLIYYTSNLHSGVPSRFSGSGSGTDYTLTISSLQPEDFATYFCQQGDTLPWTFGQGTKLEIK

SEQ ID NO: 1115 - protein, 107 aa, Artificial Sequence; identical to SEQ ID NO: 781
  source: /note="Description of Artificial Sequence: Synthetic polypeptide"

SEQ ID NO: 1116 - protein, 107 aa, Artificial Sequence; identical to SEQ ID NO: 333
  source: /note="Description of Artificial Sequence: Synthetic polypeptide"

SEQ ID NO: 1117 - protein, 107 aa, Artificial Sequence
  source: /note="Description of Artificial Sequence: Synthetic polypeptide"
DIQMTQSPSSLSASVGDRVTITCRASQDIFSYLNWYQQKPGKAVKLLIYYTSILHSGVPSRFSGSGSGTDYTLTISSLQPEDFATYFCQQGDTLPWTFGQGTKLEIK

SEQ ID NO: 1118 - protein, 107 aa, Artificial Sequence
  source: /note="Description of Artificial Sequence: Synthetic polypeptide"
DIQMTQSPSSLSASVGDRVTITCRASQDITNYLNWYQQKPGKAVKLLIYYTSQLHSGVPSRFSGSGSGTDYTLTISSLQPEDFATYFCQQGDELPWTFGQGTKLEIK

SEQ ID NO: 1119 - protein, 107 aa, Artificial Sequence
  source: /note="Description of Artificial Sequence: Synthetic polypeptide"
DIQMTQSPSSLSASVGDRVTITCRASQDIYNYLNWYQQKPGKAVKLLIYYTSYLHSGVPSRFSGSGSGTDYTLTISSLQPEDFATYFCQQGDTQPWTFGQGTKLEIK

SEQ ID NO: 1120 - protein, 107 aa, Artificial Sequence
  source: /note="Description of Artificial Sequence: Synthetic polypeptide"
DIQMTQSPSSLSASVGDRVTITCRASQDIYSYLNWYQQKPGKAVKLLIYYTSQLHSGVPSRFSGSGSGTDYTLTISSLQPEDFATYFCQQGDTLPWTFGQGTKLEIK

SEQ ID NO: 1121 - protein, 107 aa, Artificial Sequence; identical to SEQ ID NO: 1084
  source: /note="Description of Artificial Sequence: Synthetic polypeptide"

SEQ ID NO: 1122 - protein, 107 aa, Artificial Sequence
  source: /note="Description of Artificial Sequence: Synthetic polypeptide"
DIQMTQSPSSLSASVGDRVTITCRASQDIYHYLNWYQQKPGKAVKLLIYYTSRLHSGVPSRFSGSGSGTDYTLTISSLQPEDFATYFCQQGDGLPWTFGQGTKLEIK

SEQ ID NO: 1123 - protein, 107 aa, Artificial Sequence
  source: /note="Description of Artificial Sequence: Synthetic polypeptide"
DIQMTQSPSSLSASVGDRVTITCRASQDIYSYLNWYQQKPGKAVKLLIYYTSGLHSGVPSRFSGSGSGTDYTLTISSLQPEDFATYFCQQGDTLPWTFGQGTKLEIK

SEQ ID NO: 1124 - protein, 107 aa, Artificial Sequence; identical to SEQ ID NO: 955
  source: /note="Description of Artificial Sequence: Synthetic polypeptide"

SEQ ID NO: 1125 - protein, 107 aa, Artificial Sequence
  source: /note="Description of Artificial Sequence: Synthetic polypeptide"
DIQMTQSPSSLSASVGDRVTITCRASQDIFYYLNWYQQKPGKAVKLLIYYTSRLHSGVPSRFSGSGSGTDYTLTISSLQPEDFATYFCQQGDTLPWTFGQGTKLEIK

SEQ ID NO: 1126 - protein, 107 aa, Artificial Sequence
  source: /note="Description of Artificial Sequence: Synthetic polypeptide"
DIQMTQSPSSLSASVGDRVTITCRASQDIYNYLNWYQQKPGKAVKLLIYYTSRLHSGVPSRFSGSGSGTDYTLTISSLQPEDFATYFCQQGDALPWTFGQGTKLEIK

SEQ ID NO: 1127 - protein, 107 aa, Artificial Sequence; identical to SEQ ID NO: 1088
  source: /note="Description of Artificial Sequence: Synthetic polypeptide"

SEQ ID NO: 1128 - protein, 107 aa, Artificial Sequence; identical to SEQ ID NO: 21
  source: /note="Description of Artificial Sequence: Synthetic polypeptide"

SEQ ID NO: 1129 - protein, 107 aa, Artificial Sequence; identical to SEQ ID NO: 163
  source: /note="Description of Artificial Sequence: Synthetic polypeptide"

SEQ ID NO: 1130 - protein, 107 aa, Artificial Sequence
  source: /note="Description of Artificial Sequence: Synthetic polypeptide"
DIQMTQSPSSLSASVGDRVTITCRASQDITKYLNWYQQKPGKAVKLLIYYTSRLHSGVPSRFSGSGSGTDYTLTISSLQPEDFATYFCQQGDTLPWTFGQGTKLEIK

SEQ ID NO: 1131 - protein, 107 aa, Artificial Sequence
  source: /note="Description of Artificial Sequence: Synthetic polypeptide"
DIQMTQSPSSLSASVGDRVTITCRASQDIYKYLNWYQQKPGKAVKLLIYYTSELHSGVPSRFSGSGSGTDYTLTISSLQPEDFATYFCQQGDTLPWTFGQGTKLEIK

SEQ ID NO: 1132 - protein, 107 aa, Artificial Sequence
  source: /note="Description of Artificial Sequence: Synthetic polypeptide"
DIQMTQSPSSLSASVGDRVTITCRASQDIFSYLNWYQQKPGKAVKLLIYYTSRLHSGVPSRFSGSGSGTDYTLTISSLQPEDFATYFCQQGDTLPWTFGQGTKLEIK

SEQ ID NO: 1133 - protein, 107 aa, Artificial Sequence
  source: /note="Description of Artificial Sequence: Synthetic polypeptide"
DIQMTQSPSSLSASVGDRVTITCRASQDIYHYLNWYQQKPGKAVKLLIYYTSRLHSGVPSRFSGSGSGTDYTLTISSLQPEDFATYFCQQGDTLPWTFGQGTKLEIK

SEQ ID NO: 1134 - protein, 107 aa, Artificial Sequence
  source: /note="Description of Artificial Sequence: Synthetic polypeptide"
DIQMTQSPSSLSASVGDRVTITCRASQDIYNYLNWYQQKPGKAVKLLIYYTSALHSGVPSRFSGSGSGTDYTLTISSLQPEDFATYFCQQGDTLPWTFGQGTKLEIK

SEQ ID NO: 1135 - protein, 107 aa, Artificial Sequence; identical to SEQ ID NO: 1081
  source: /note="Description of Artificial Sequence: Synthetic polypeptide"

SEQ ID NO: 1136 - protein, 107 aa, Artificial Sequence
  source: /note="Description of Artificial Sequence: Synthetic polypeptide"
DIQMTQSPSSLSASVGDRVTITCRASQDIYNYLNWYQQKPGKAVKLLIYYTSRLHSGVPSRFSGSGSGTDYTLTISSLQPEDFATYFCQQGDTVPWTFGQGTKLEIK

SEQ ID NO: 1137 - protein, 107 aa, Artificial Sequence
  source: /note="Description of Artificial Sequence: Synthetic polypeptide"
DIQMTQSPSSLSASVGDRVTITCRASQDIYNYLNWYQQKPGKAVKLLIYYQSALHSGVPSRFSGSGSGTDYTLTISSLQPEDFATYFCQQGDTLPWTFGQGTKLEIK

SEQ ID NO: 1138 - protein, 118 aa, Artificial Sequence
  source: /note="Description of Artificial Sequence: Synthetic polypeptide"
EVQLVQSGAEVKKPGASVKVSCKASGYTFTHYDMHWVRQAPGQGLEWMGRIDPQGGGIKYAQKFQGRATLTVDTSTSTAYMELSRLRSDDTAVYYCARWDYGGQFDVWGQGTLVTVSS

SEQ ID NO: 1139 - protein, 118 aa, Artificial Sequence
  source: /note="Description of Artificial Sequence: Synthetic polypeptide"
EVQLVQSGAEVKKPGASVKVSCKASGYTFTSYLMQWVRQAPGQGLEWMGRIDPQDGDIKYAQKFQGRATLTVDTSTSTAYMELSRLRSDDTAVYYCARWDHGGYFDVWGQGTLVTVSS

SEQ ID NO: 1140 - protein, 118 aa, Artificial Sequence
  source: /note="Description of Artificial Sequence: Synthetic polypeptide"
EVQLVQSGAEVKKPGASVKVSCKASGYTFTSYDMHWVRQAPGQGLEWMGRIDPQDGGIKYAQKFQGRATLTVDTSTSTAYMELSRLRSDDTAVYYCARWDYGGYFDVWGQGTLVTVSS

SEQ ID NO: 1141 - protein, 118 aa, Artificial Sequence
  source: /note="Description of Artificial Sequence: Synthetic polypeptide"
EVQLVQSGAEVKKPGASVKVSCKASGYTFTSYYMNWVRQAPGQGLEWMGRIDPDDGDIKYAQKFQGRATLTVDTSTSTAYMELSRLRSDDTAVYYCARWDYGGYFDVWGQGTLVTVSS

SEQ ID NO: 1142 - protein, 118 aa, Artificial Sequence; identical to SEQ ID NO: 935
  source: /note="Description of Artificial Sequence: Synthetic polypeptide"

SEQ ID NO: 1143 - protein, 118 aa, Artificial Sequence
  source: /note="Description of Artificial Sequence: Synthetic polypeptide"
EVQLVQSGAEVKKPGASVKVSCKASGYTFTKYLMSWVRQAPGQGLEWMGRIDPQDGDIKYAQKFQGRATLTVDTSTSTAYMELSRLRSDDTAVYYCARWDYGGYFDVWGQGTLVTVSS

SEQ ID NO: 1144 - protein, 118 aa, Artificial Sequence
  source: /note="Description of Artificial Sequence: Synthetic polypeptide"
EVQLVQSGAEVKKPGASVKVSCKASGYTFTSYDMHWVRQAPGQGLEWMGRIDPQDGGSKYAQKFQGRATLTVDTSTSTAYMELSRLRSDDTAVYYCARWDYGGYFDVWGQGTLVTVSS

SEQ ID NO: 1145 - protein, 118 aa, Artificial Sequence
  source: /note="Description of Artificial Sequence: Synthetic polypeptide"
EVQLVQSGAEVKKPGASVKVSCKASGYTFTSYYINWVRQAPGQGLEWMGRIDPQSGGIKYAQKFQGRATLTVDTSTSTAYMELSRLRSDDTAVYYCARYDHGGYFDVWGQGTLVTVSS

SEQ ID NO: 1146 - protein, 118 aa, Artificial Sequence
  source: /note="Description of Artificial Sequence: Synthetic polypeptide"
EVQLVQSGAEVKKPGASVKVSCKASGYTFTSYDLHWVRQAPGQGLEWMGRIDPYDGGTKYAQKFQGRATLTVDTSTSTAYMELSRLRSDDTAVYYCARWDYGGYFDVWGQGTLVTVSS

SEQ ID NO: 1147 - protein, 118 aa, Artificial Sequence
  source: /note="Description of Artificial Sequence: Synthetic polypeptide"
EVQLVQSGAEVKKPGASVKVSCKASGYTFTNYDMHWVRQAPGQGLEWMGRIDPQGGGIRYAQKFQGRATLTVDTSTSTAYMELSRLRSDDTAVYYCARWDYGGYFDVWGQGTLVTVSS

SEQ ID NO: 1148 - protein, 118 aa, Artificial Sequence
  source: /note="Description of Artificial Sequence: Synthetic polypeptide"
EVQLVQSGAEVKKPGASVKVSCKASGYTFTSYDMHWVRQAPGQGLEWMGRIDPPSGGIKYAQKFQGRATLTVDTSTSTAYMELSRLRSDDTAVYYCARWHTGGYFDVWGQGTLVTVSS

SEQ ID NO: 1149 - protein, 118 aa, Artificial Sequence
  source: /note="Description of Artificial Sequence: Synthetic polypeptide"
EVQLVQSGAEVKKPGASVKVSCKASGYTFTSYDMHWVRQAPGQGLEWMGRIDPDGGGIKYAQKFQGRATLTVDTSTSTAYMELSRLRSDDTAVYYCARWDYGGQFDVWGQGTLVTVSS

SEQ ID NO: 1150 - protein, 118 aa, Artificial Sequence
  source: /note="Description of Artificial Sequence: Synthetic polypeptide"
EVQLVQSGAEVKKPGASVKVSCKASGYTFTSYLMQWVRQAPGQGLEWMGRIDPSDGGTKYAQKFQGRATLTVDTSTSTAYMELSRLRSDDTAVYYCARWDYGGYFDVWGQGTLVTVSS

SEQ ID NO: 1151 - protein, 118 aa, Artificial Sequence
  source: /note="Description of Artificial Sequence: Synthetic polypeptide"
EVQLVQSGAEVKKPGASVKVSCKASGYTFTSYLMQWVRQAPGQGLEWMGRIDPIDGGIKYAQKFQGRATLTVDTSTSTAYMELSRLRSDDTAVYYCARWHYGGYFDVWGQGTLVTVSS

SEQ ID NO: 1152 - protein, 118 aa, Artificial Sequence
  source: /note="Description of Artificial Sequence: Synthetic polypeptide"
EVQLVQSGAEVKKPGASVKVSCKASGYTFTSYYMNWVRQAPGQGLEWMGRIDPFDGSIKYAQKFQGRATLTVDTSTSTAYMELSRLRSDDTAVYYCARWDYGGYFDVWGQGTLVTVSS

SEQ ID NO: 1153 - protein, 118 aa, Artificial Sequence
  source: /note="Description of Artificial Sequence: Synthetic polypeptide"
EVQLVQSGAEVKKPGASVKVSCKASGYTFTYYDMHWVRQAPGQGLEWMGRIDPQSGGIKYAQKFQGRATLTVDTSTSTAYMELSRLRSDDTAVYYCARWDYGGQFDVWGQGTLVTVSS

SEQ ID NO: 1154 - protein, 118 aa, Artificial Sequence
  source: /note="Description of Artificial Sequence: Synthetic polypeptide"
EVQLVQSGAEVKKPGASVKVSCKASGYTFTHYDMHWVRQAPGQGLEWMGRIDPVSGGIKYAQKFQGRATLTVDTSTSTAYMELSRLRSDDTAVYYCARWDYGGQFDVWGQGTLVTVSS

SEQ ID NO: 1155 - protein, 118 aa, Artificial Sequence
  source: /note="Description of Artificial Sequence: Synthetic polypeptide"
EVQLVQSGAEVKKPGASVKVSCKASGYTFTSYDIHWVRQAPGQGLEWMGRIDPISGGIKYAQKFQGRATLTVDTSTSTAYMELSRLRSDDTAVYYCARWDYGGYFDVWGQGTLVTVSS

SEQ ID NO: 1156 - protein, 118 aa, Artificial Sequence
  source: /note="Description of Artificial Sequence: Synthetic polypeptide"
EVQLVQSGAEVKKPGASVKVSCKASGYTFTSYYMNWVRQAPGQGLEWMGRIDPQSGGVKYAQKFQGRATLTVDTSTSTAYMELSRLRSDDTAVYYCARWHYGGQFDVWGQGTLVTVSS

SEQ ID NO: 1157 - protein, 118 aa, Artificial Sequence
  source: /note="Description of Artificial Sequence: Synthetic polypeptide"
EVQLVQSGAEVKKPGASVKVSCKASGYTFTSYDMHWVRQAPGQGLEWMGRIDPQSGGQKYAQKFQGRATLTVDTSTSTAYMELSRLRSDDTAVYYCARWDYGGQFDVWGQGTLVTVSS

SEQ ID NO: 1158 - protein, 118 aa, Artificial Sequence
  source: /note="Description of Artificial Sequence: Synthetic polypeptide"
EVQLVQSGAEVKKPGASVKVSCKASGYTFTRYDMHWVRQAPGQGLEWMGRIDPQSGGTKYAQKFQGRATLTVDTSTSTAYMELSRLRSDDTAVYYCARWHTGGQFDVWGQGTLVTVSS

SEQ ID NO: 1159 - protein, 118 aa, Artificial Sequence
  source: /note="Description of Artificial Sequence: Synthetic polypeptide"
EVQLVQSGAEVKKPGASVKVSCKASGYTFTHYDMHWVRQAPGQGLEWMGRIDPQTGGIKYAQKFQGRATLTVDTSTSTAYMELSRLRSDDTAVYYCARWDYGGQFDVWGQGTLVTVSS

SEQ ID NO: 1160 - protein, 118 aa, Artificial Sequence
  source: /note="Description of Artificial Sequence: Synthetic polypeptide"
EVQLVQSGAEVKKPGASVKVSCKASGYTFTQYDLHWVRQAPGQGLEWMGRIDPQTGGIKYAQKFQGRATLTVDTSTSTAYMELSRLRSDDTAVYYCARWDYGGQFDVWGQGTLVTVSS

SEQ ID NO: 1161 - protein, 118 aa, Artificial Sequence
  source: /note="Description of Artificial Sequence: Synthetic polypeptide"
EVQLVQSGAEVKKPGASVKVSCKASGYTFTSYDLHWVRQAPGQGLEWMGRIDPYSGGIKYAQKFQGRATLTVDTSTSTAYMELSRLRSDDTAVYYCARWDYGGYFDVWGQGTLVTVSS

SEQ ID NO: 1162 - protein, 118 aa, Artificial Sequence
  source: /note="Description of Artificial Sequence: Synthetic polypeptide"
EVQLVQSGAEVKKPGASVKVSCKASGYTFTSYDMHWVRQAPGQGLEWMGRIDPISGGIKYAQKFQGRATLTVDTSTSTAYMELSRLRSDDTAVYYCARWDYGGYFDVWGQGTLVTVSS

SEQ ID NO: 1163 - protein, 118 aa, Artificial Sequence
  source: /note="Description of Artificial Sequence: Synthetic polypeptide"
EVQLVQSGAEVKKPGASVKVSCKASGYTFTSYDKHWVRQAPGQGLEWMGRIDPASGGIRYAQKFQGRATLTVDTSTSTAYMELSRLRSDDTAVYYCARWDYGGQFDVWGQGTLVTVSS

SEQ ID NO: 1164 - protein, 118 aa, Artificial Sequence
  source: /note="Description of Artificial Sequence: Synthetic polypeptide"
EVQLVQSGAEVKKPGASVKVSCKASGYTFTSYDTHWVRQAPGQGLEWMGRIDPQDGGVKYAQKFQGRATLTVDTSTSTAYMELSRLRSDDTAVYYCARWDYGGYFDVWGQGTLVTVSS

SEQ ID NO: 1165 - protein, 118 aa, Artificial Sequence
  source: /note="Description of Artificial Sequence: Synthetic polypeptide"
EVQLVQSGAEVKKPGASVKVSCKASGYTFTSYDNHWVRQAPGQGLEWMGRIDPQSGGVIYAQKFQGRATLTVDTSTSTAYMELSRLRSDDTAVYYCARWDYGGYFDVWGQGTLVTVSS

SEQ ID NO: 1166 - protein, 118 aa, Artificial Sequence
  source: /note="Description of Artificial Sequence: Synthetic polypeptide"
EVQLVQSGAEVKKPGASVKVSCKASGYTFTQYDIHWVRQAPGQGLEWMGRIDPTSGGIKYAQKFQGRATLTVDTSTSTAYMELSRLRSDDTAVYYCARWDYGGYFDVWGQGTLVTVSS

SEQ ID NO: 1167 - protein, 118 aa, Artificial Sequence
  source: /note="Description of Artificial Sequence: Synthetic polypeptide"
EVQLVQSGAEVKKPGASVKVSCKASGYTFTSYDLHWVRQAPGQGLEWMGRIDPQSGGIRYAQKFQGRATLTVDTSTSTAYMELSRLRSDDTAVYYCARWDYGGQFDVWGQGTLVTVSS

SEQ ID NO: 1168 - protein, 118 aa, Artificial Sequence
  source: /note="Description of Artificial Sequence: Synthetic polypeptide"
EVQLVQSGAEVKKPGASVKVSCKASGYTFTSYDLHWVRQAPGQGLEWMGRIDPPTGGIKYAQKFQGRATLTVDTSTSTAYMELSRLRSDDTAVYYCARWDYGGYFDVWGQGTLVTVSS

SEQ ID NO: 1169 - protein, 118 aa, Artificial Sequence
  source: /note="Description of Artificial Sequence: Synthetic polypeptide"
EVQLVQSGAEVKKPGASVKVSCKASGYTFTEYDMHWVRQAPGQGLEWMGRIDPQSGGIRYAQKFQGRATLTVDTSTSTAYMELSRLRSDDTAVYYCARWDYGGQFDAWGQGTLVTVSS

SEQ ID NO: 1170 - protein, 118 aa, Artificial Sequence
  source: /note="Description of Artificial Sequence: Synthetic polypeptide"
EVQLVQSGAEVKKPGASVKVSCKASGYTFTLYDMHWVRQAPGQGLEWMGRIDPVSGGIKYAQKFQGRATLTVDTSTSTAYMELSRLRSDDTAVYYCARWDYGGQFDVWGQGTLVTVSS

SEQ ID NO: 1171 - protein, 118 aa, Artificial Sequence
  source: /note="Description of Artificial Sequence: Synthetic polypeptide"
EVQLVQSGAEVKKPGASVKVSCKASGYTFTSYDMHWVRQAPGQGLEWMGRIDPQSGGTKYAQKFQGRATLTVDTSTSTAYMELSRLRSDDTAVYYCARWDYGGQFDVWGQGTLVTVSS

SEQ ID NO: 1172 - protein, 118 aa, Artificial Sequence
  source: /note="Description of Artificial Sequence: Synthetic polypeptide"
EVQLVQSGAEVKKPGASVKVSCKASGYTFTSYDMHWVRQAPGQGLEWMGRIDPQSGGIKYAQKFQGRATLTVDTSTSTAYMELSRLRSDDTAVYYCARWDYGGQFDVWGQGTLVTVSS

SEQ ID NO: 1173 - protein, 118 aa, Artificial Sequence
  source: /note="Description of Artificial Sequence: Synthetic polypeptide"
EVQLVQSGAEVKKPGASVKVSCKASGYTFTSYDIHWVRQAPGQGLEWMGRIDPVSGGTKYAQKFQGRATLTVDTSTSTAYMELSRLRSDDTAVYYCARWDYGGQFDVWGQGTLVTVSS

SEQ ID NO: 1174 - protein, 118 aa, Artificial Sequence
  source: /note="Description of Artificial Sequence: Synthetic polypeptide"
EVQLVQSGAEVKKPGASVKVSCKASGYTFTSYDLHWVRQAPGQGLEWMGRIDPQSGGIKYAQKFQGRATLTVDTSTSTAYMELSRLRSDDTAVYYCARWDYGGQFDVWGQGTLVTVSS

SEQ ID NO: 1175 - protein, 118 aa, Artificial Sequence
  source: /note="Description of Artificial Sequence: Synthetic polypeptide"
EVQLVQSGAEVKKPGASVKVSCKASGYTFTSYFLNWVRQAPGQGLEWMGRIDPQIGDSKYAQKFQGRATLTVDTSTSTAYMELSRLRSDDTAVYYCARWDYGGYFDVWGQGTLVTVSS

SEQ ID NO: 1176 - protein, 118 aa, Artificial Sequence
  source: /note="Description of Artificial Sequence: Synthetic polypeptide"
EVQLVQSGAEVKKPGASVKVSCKASGYTFTSYDVHWVRQAPGQGLEWMGRIDPQSGGARYAQKFQGRATLTVDTSTSTAYMELSRLRSDDTAVYYCARWDYGGQFDVWGQGTLVTVSS

SEQ ID NO: 1177 - protein, 118 aa, Artificial Sequence
  source: /note="Description of Artificial Sequence: Synthetic polypeptide"
EVQLVQSGAEVKKPGASVKVSCKASGYTFTSYDMHWVRQAPGQGLEWMGRIDPQSGGIRYAQKFQGRATLTVDTSTSTAYMELSRLRSDDTAVYYCARWDYGGQFDVWGQGTLVTVSS

SEQ ID NO: 1178 - protein, 118 aa, Artificial Sequence
  source: /note="Description of Artificial Sequence: Synthetic polypeptide"
EVQLVQSGAEVKKPGASVKVSCKASGYTFTVYEMQWVRQAPGQGLEWMGRIDPQSGSNHYAQKFQGRATLTVDTSTSTAYMELSRLRSDDTAVYYCARWDYGGYFDVWGQGTLVTVSS

SEQ ID NO: 1179 - protein, 118 aa, Artificial Sequence
  source: /note="Description of Artificial Sequence: Synthetic polypeptide"
EVQLVQSGAEVKKPGASVKVSCKASGYTFTSYYFHWVRQAPGQGLEWMGRIDPQDGDIKYAQKFQGRATLTVDTSTSTAYMELSRLRSDDTAVYYCARWDYGGYFDVWGQGTLVTVSS

SEQ ID NO: 1180 - protein, 107 aa, Artificial Sequence
  source: /note="Description of Artificial Sequence: Synthetic polypeptide"
DIQMTQSPSSLSASVGDRVTITCRASQDIYNYLNWYQQKPGKAVKLLIYYTSELHSGVPSRFSGSGSGTDYTLTISSLQPEDFATYFCQQGDVLPWTFGQGTKLEIK

SEQ ID NO: 1181 - protein, 107 aa, Artificial Sequence; identical to SEQ ID NO: 1020
  source: /note="Description of Artificial Sequence: Synthetic polypeptide"

SEQ ID NO: 1182 - protein, 107 aa, Artificial Sequence; identical to SEQ ID NO: 1035
  source: /note="Description of Artificial Sequence: Synthetic polypeptide"

SEQ ID NO: 1183 - protein, 107 aa, Artificial Sequence; identical to SEQ ID NO: 1114
  source: /note="Description of Artificial Sequence: Synthetic polypeptide"

SEQ ID NO: 1184 - protein, 107 aa, Artificial Sequence
  source: /note="Description of Artificial Sequence: Synthetic polypeptide"
DIQMTQSPSSLSASVGDRVTITCRASQDIYSYLNWYQQKPGKAVKLLIYYTSILHSGVPSRFSGSGSGTDYTLTISSLQPEDFATYFCQQGDTLPWTFGQGTKLEIK

SEQ ID NO: 1185 - protein, 107 aa, Artificial Sequence
  source: /note="Description of Artificial Sequence: Synthetic polypeptide"
DIQMTQSPSSLSASVGDRVTITCRASQDIYNYLNWYQQKPGKAVKLLIYYTSRLHSGVPSRFSGSGSGTDYTLTISSLQPEDFATYFCQQGDNLPWTFGQGTKLEIK

SEQ ID NO: 1186 - protein, 107 aa, Artificial Sequence; identical to SEQ ID NO: 697
  source: /note="Description of Artificial Sequence: Synthetic polypeptide"

SEQ ID NO: 1187 - protein, 107 aa, Artificial Sequence; identical to SEQ ID NO: 955
  source: /note="Description of Artificial Sequence: Synthetic polypeptide"

SEQ ID NO: 1188 - protein, 107 aa, Artificial Sequence
  source: /note="Description of Artificial Sequence: Synthetic polypeptide"
DIQMTQSPSSLSASVGDRVTITCRASQDIYHYLNWYQQKPGKAVKLLIYYTSHLHSGVPSRFSGSGSGTDYTLTISSLQPEDFATYFCQQGDEIPWTFGQGTKLEIK

SEQ ID NO: 1189 - protein, 107 aa, Artificial Sequence; identical to SEQ ID NO: 1088
  source: /note="Description of Artificial Sequence: Synthetic polypeptide"

SEQ ID NO: 1190 - protein, 107 aa, Artificial Sequence
  source: /note="Description of Artificial Sequence: Synthetic polypeptide"
DIQMTQSPSSLSASVGDRVTITCRASQDIYNYLNWYQQKPGKAVKLLIYYTSPLHSGVPSRFSGSGSGTDYTLTISSLQPEDFATYFCQQGDTLPWTFGQGTKLEIK

SEQ ID NO: 1191 - protein, 107 aa, Artificial Sequence
  source: /note="Description of Artificial Sequence: Synthetic polypeptide"
DIQMTQSPSSLSASVGDRVTITCRASQDIYKYLNWYQQKPGKAVKLLIYYTSILHSGVPSRFSGSGSGTDYTLTISSLQPEDFATYFCQQGDELPWTFGQGTKLEIK

SEQ ID NO: 1192 - protein, 107 aa, Artificial Sequence
  source: /note="Description of Artificial Sequence: Synthetic polypeptide"
DIQMTQSPSSLSASVGDRVTITCRASQDIYKYLNWYQQKPGKAVKLLIYYTSNLHSGVPSRFSGSGSGTDYTLTISSLQPEDFATYFCQQGDEIPWTFGQGTKLEIK

SEQ ID NO: 1193 - protein, 107 aa, Artificial Sequence; identical to SEQ ID NO: 630
  source: /note="Description of Artificial Sequence: Synthetic polypeptide"

SEQ ID NO: 1194 - protein, 107 aa, Artificial Sequence
  source: /note="Description of Artificial Sequence: Synthetic polypeptide"
DIQMTQSPSSLSASVGDRVTITCRASQDIFYYLNWYQQKPGKAVKLLIYYTSVLHSGVPSRFSGSGSGTDYTLTISSLQPEDFATYFCQQGDTLPWTFGQGTKLEIK

SEQ ID NO: 1195 - protein, 107 aa, Artificial Sequence; identical to SEQ ID NO: 954
  source: /note="Description of Artificial Sequence: Synthetic polypeptide"

SEQ ID NO: 1196 - protein, 107 aa, Artificial Sequence; identical to SEQ ID NO: 966
  source: /note="Description of Artificial Sequence: Synthetic polypeptide"

SEQ ID NO: 1197 - protein, 107 aa, Artificial Sequence
  source: /note="Description of Artificial Sequence: Synthetic polypeptide"
DIQMTQSPSSLSASVGDRVTITCRASQDIWKYLNWYQQKPGKAVKLLIYYTSILHSGVPSRFSGSGSGTDYTLTISSLQPEDFATYFCQQGDTIPWTFGQGTKLEIK

SEQ ID NO: 1198 - protein, 107 aa, Artificial Sequence
  source: /note="Description of Artificial Sequence: Synthetic polypeptide"
DIQMTQSPSSLSASVGDRVTITCRASQDIFNYLNWYQQKPGKAVKLLIYYTSHLHSGVPSRFSGSGSGTDYTLTISSLQPEDFATYFCQQGDTLPWTFGQGTKLEIK

SEQ ID NO: 1199 - protein, 107 aa, Artificial Sequence
  source: /note="Description of Artificial Sequence: Synthetic polypeptide"
DIQMTQSPSSLSASVGDRVTITCRASQDIWNYLNWYQQKPGKAVKLLIYYTSTLHSGVPSRFSGSGSGTDYTLTISSLQPEDFATYFCQQGDLLPWTFGQGTKLEIK

SEQ ID NO: 1200 - protein, 107 aa, Artificial Sequence
  source: /note="Description of Artificial Sequence: Synthetic polypeptide"
DIQMTQSPSSLSASVGDRVTITCRASQDIFNYLNWYQQKPGKAVKLLIYYTSYLHSGVPSRFSGSGSGTDYTLTISSLQPEDFATYFCQQGDTLPWTFGQGTKLEIK

SEQ ID NO: 1201 - protein, 107 aa, Artificial Sequence
  source: /note="Description of Artificial Sequence: Synthetic polypeptide"
DIQMTQSPSSLSASVGDRVTITCRASQDIYSYLNWYQQKPGKAVKLLIYYTSRLHSGVPSRFSGSGSGTDYTLTISSLQPEDFATYFCQQGDTLPWTFGQGTKLEIK

SEQ ID NO: 1202 - protein, 107 aa, Artificial Sequence; identical to SEQ ID NO: 968
  source: /note="Description of Artificial Sequence: Synthetic polypeptide"

SEQ ID NO: 1203 - protein, 107 aa, Artificial Sequence; identical to SEQ ID NO: 1031
  source: /note="Description of Artificial Sequence: Synthetic polypeptide"

SEQ ID NO: 1204 - protein, 107 aa, Artificial Sequence; identical to SEQ ID NO: 163
  source: /note="Description of Artificial Sequence: Synthetic polypeptide"

SEQ ID NO: 1205 - protein, 107 aa, Artificial Sequence; identical to SEQ ID NO: 1026
  source: /note="Description of Artificial Sequence: Synthetic polypeptide"

SEQ ID NO: 1206 - protein, 107 aa, Artificial Sequence; identical to SEQ ID NO: 1011
  source: /note="Description of Artificial Sequence: Synthetic polypeptide"

SEQ ID NO: 1207 - protein, 107 aa, Artificial Sequence
  source: /note="Description of Artificial Sequence: Synthetic polypeptide"
DIQMTQSPSSLSASVGDRVTITCRASQDIYNYLNWYQQKPGKAVKLLIYYTSHLHSGVPSRFSGSGSGTDYTLTISSLQPEDFATYFCQQGDALPWTFGQGTKLEIK

SEQ ID NO: 1208 - protein, 107 aa, Artificial Sequence; identical to SEQ ID NO: 1134
  source: /note="Description of Artificial Sequence: Synthetic polypeptide"

SEQ ID NO: 1209 - protein, 107 aa, Artificial Sequence; identical to SEQ ID NO: 1069
  source: /note="Description of Artificial Sequence: Synthetic polypeptide"

SEQ ID NO: 1210 - protein, 107 aa, Artificial Sequence
  source: /note="Description of Artificial Sequence: Synthetic polypeptide"
DIQMTQSPSSLSASVGDRVTITCRASQDIYNYLNWYQQKPGKAVKLLIYYESRLHSGVPSRFSGSGSGTDYTLTISSLQPEDFATYFCQQGDELPWTFGQGTKLEIK

SEQ ID NO: 1211 - protein, 107 aa, Artificial Sequence
  source: /note="Description of Artificial Sequence: Synthetic polypeptide"
DIQMTQSPSSLSASVGDRVTITCRASQDIYNYLNWYQQKPGKAVKLLIYYTSNLHSGVPSRFSGSGSGTDYTLTISSLQPEDFATYFCQQGDTMPWTFGQGTKLEIK

SEQ ID NO: 1212 - protein, 118 aa, Artificial Sequence
  source: /note="Description of Artificial Sequence: Synthetic polypeptide"
EVQLVQSGAEVKKPGASVKVSCKASGYTFTSYYMQWVRQAPGQGLEWMGRIDPQSGGIKYAQKFQGRATLTVDTSTSTAYMELSRLRSDDTAVYYCARWDYGGYFDVWGQGTLVTVSS

SEQ ID NO: 1213 - protein, 5 aa, Artificial Sequence
  source: /note="Description of Artificial Sequence: Synthetic peptide"
  VARIANT (1)..(1): /replace="R" or "N" or "T"
  VARIANT (3)..(3): /replace="W" or "L" or "D" or "F"
  VARIANT (4)..(4): /replace="I" or "L"
  VARIANT (5)..(5): /replace="N" or "H" or "S" or "A"
  SITE (1)..(5): /note="Variant residues given in the sequence have no preference with respect to those in the annotations for variant positions"
SYYMQ

SEQ ID NO: 1214 - protein, 17 aa, Artificial Sequence
  source: /note="Description of Artificial Sequence: Synthetic peptide"
  VARIANT (5)..(5): /replace="E" or "L" or "W" or "D"
  VARIANT (6)..(6): /replace="D" or "R" or "N" or "I" or "G"
  VARIANT (8)..(8): /replace="D"
  VARIANT (9)..(9): /replace="V" or "S" or "F"
  VARIANT (10)..(10): /replace="R" or "I" or "L"
  SITE (1)..(17): /note="Variant residues given in the sequence have no preference with respect to those in the annotations for variant positions"
RIDPQSGGIKYAQKFQG

SEQ ID NO: 1215 - protein, 9 aa, Artificial Sequence
  source: /note="Description of Artificial Sequence: Synthetic peptide"
  VARIANT (3)..(3): /replace="W"
  VARIANT (6)..(6): /replace="Q"
  SITE (1)..(9): /note="Variant residues given in the sequence have no preference with respect to those in the annotations for variant positions"
WDYGGYFDV

SEQ ID NO: 1216 - protein, 107 aa, Artificial Sequence; identical to SEQ ID NO: 644
  source: /note="Description of Artificial Sequence: Synthetic polypeptide"

SEQ ID NO: 1217 - protein, 11 aa, Artificial Sequence
  source: /note="Description of Artificial Sequence: Synthetic peptide"
  VARIANT (7)..(7): /replace="Y"
  VARIANT (8)..(8): /replace="S" or "H" or "Y"
  SITE (1)..(11): /note="Variant residues given in the sequence have no preference with respect to those in the annotations for variant positions"
RASQDIWNYLN

SEQ ID NO: 1218 - protein, 7 aa, Artificial Sequence
  source: /note="Description of Artificial Sequence: Synthetic peptide"
  VARIANT (2)..(2): /replace="S"
  VARIANT (4)..(4): /replace="G" or "M" or "V" or "S" or "L" or "W" or "I"
  VARIANT (6)..(6): /replace="H"
  VARIANT (7)..(7): /replace="S"
  SITE (1)..(7): /note="Variant residues given in the sequence have no preference with respect to those in the annotations for variant positions"
YTSRLET

SEQ ID NO: 1219 - protein, 9 aa, Artificial Sequence
  source: /note="Description of Artificial Sequence: Synthetic peptide"
  VARIANT (5)..(5): /replace="A" or "I" or "M"
  VARIANT (6)..(6): /replace="I"
  SITE (1)..(9): /note="Variant residues given in the sequence have no preference with respect to those in the annotations for variant positions"
QQGDTLPWT

SEQ ID NO: 1220 - protein, 118 aa, Artificial Sequence
  source: /note="Description of Artificial Sequence: Synthetic polypeptide"
EVQLVQSGAEVKKPGASVKVSCKASGYTFTSYDMQWVRQAPGQGLEWMGRIDPQSGGIKYAQKFQGRATLTVDTSTSTAYMELSRLRSDDTAVYYCARWDYGGYFDVWGQGTLVTVSS

SEQ ID NO: 1221 - protein, 5 aa, Artificial Sequence
  source: /note="Description of Artificial Sequence: Synthetic peptide"
  VARIANT (1)..(1): /replace="R" or "A"
  VARIANT (3)..(3): /replace="F" or "L" or "W" or "Y"
  VARIANT (4)..(4): /replace="I" or "L" or "V"
  VARIANT (5)..(5): /replace="H" or "N" or "Y"
  SITE (1)..(5): /note="Variant residues given in the sequence have no preference with respect to those in the annotations for variant positions"
SYDMQ

SEQ ID NO: 1222 - protein, 17 aa, Artificial Sequence
  source: /note="Description of Artificial Sequence: Synthetic peptide"
  VARIANT (5)..(5): /replace="E" or "P" or "D"
  VARIANT (6)..(6): /replace="D" or "G"
  VARIANT (8)..(8): /replace="D"
  VARIANT (9)..(9): /replace="V" or "T" or "S" or "K"
  VARIANT (10)..(10): /replace="I" or "L"
  SITE (1)..(17): /note="Variant residues given in the sequence have no preference with respect to those in the annotations for variant positions"
RIDPQSGGIKYAQKFQG

SEQ ID NO: 1223 - protein, 9 aa, Artificial Sequence
  source: /note="Description of Artificial Sequence: Synthetic peptide"
  VARIANT (1)..(1): /replace="Y"
  VARIANT (6)..(6): /replace="F"
  SITE (1)..(9): /note="Variant residues given in the sequence have no preference with respect to those in the annotations for variant positions"
WDYGGYFDV

SEQ ID NO: 1224 - protein, 107 aa, Artificial Sequence; identical to SEQ ID NO: 694
  source: /note="Description of Artificial Sequence: Synthetic polypeptide"

SEQ ID NO: 1225 - protein, 11 aa, Artificial Sequence
  source: /note="Description of Artificial Sequence: Synthetic peptide"
  VARIANT (7)..(7): /replace="F" or "A" or "S"
  VARIANT (8)..(8): /replace="H" or "S"
  SITE (1)..(11): /note="Variant residues given in the sequence have no preference with respect to those in the annotations for variant positions"
RASQDIYNYLN

SEQ ID NO: 1226 - protein, 7 aa, Artificial Sequence
  source: /note="Description of Artificial Sequence: Synthetic peptide"
  VARIANT (4)..(4): /replace="M" or "G" or "I" or "S" or "E"
  VARIANT (6)..(6): /replace="H"
  VARIANT (7)..(7): /replace="S"
  SITE (1)..(7): /note="Variant residues given in the sequence have no preference with respect to those in the annotations for variant positions"
YTSRLET

SEQ ID NO: 1227 - protein, 9 aa, Artificial Sequence
  source: /note="Description of Artificial Sequence: Synthetic peptide"
  VARIANT (4)..(4): /replace="E"
  VARIANT (5)..(5): /replace="A" or "I" or "S" or "E"
  VARIANT (6)..(6): /replace="I"
  SITE (1)..(9): /note="Variant residues given in the sequence have no preference with respect to those in the annotations for variant positions"
QQGDTLPWT

SEQ ID NO: 1228 - protein, 118 aa, Artificial Sequence
  source: /note="Description of Artificial Sequence: Synthetic polypeptide"
EVQLVQSGAEVKKPGASVKVSCKASGYTFTSYLMQWVRQAPGQGLEWMGRIDPQSGGIKYAQKFQGRATLTVDTSTSTAYMELSRLRSDDTAVYYCARWDYGGYFDVWGQGTLVTVSS

SEQ ID NO: 1229 - protein, 5 aa, Artificial Sequence
  source: /note="Description of Artificial Sequence: Synthetic peptide"
  VARIANT (1)..(1): /replace="R" or "N"
  VARIANT (3)..(3): /replace="W" or "D"
  VARIANT (4)..(4): /replace="L" or "I" or "V"
  VARIANT (5)..(5): /replace="H" or "N" or "S" or "T" or "C"
  SITE (1)..(5): /note="Variant residues given in the sequence have no preference with respect to those in the annotations for variant positions"
SYLMQ

SEQ ID NO: 1230 - protein, 17 aa, Artificial Sequence
  source: /note="Description of Artificial Sequence: Synthetic peptide"
  VARIANT (5)..(5): /replace="E" or "R" or "L" or "P" or "D"
  VARIANT (6)..(6): /replace="N" or "G"
  VARIANT (8)..(8): /replace="D"
  VARIANT (9)..(9): /replace="V" or "S" or "T" or "N" or "F"
  VARIANT (10)..(10): /replace="I" or "R" or "N"
  SITE (1)..(17): /note="Variant residues given in the sequence have no preference with respect to those in the annotations for variant positions"
RIDPQSGGIKYAQKFQG

SEQ ID NO: 1231 - protein, 9 aa, Artificial Sequence
  source: /note="Description of Artificial Sequence: Synthetic peptide"
  VARIANT (2)..(2): /replace="N"
  VARIANT (3)..(3): /replace="W" or "F" or "H"
  VARIANT (6)..(6): /replace="F"
  SITE (1)..(9): /note="Variant residues given in the sequence have no preference with respect to those in the annotations for variant positions"
WDYGGYFDV

SEQ ID NO: 1232 - protein, 107 aa, Artificial Sequence; identical to SEQ ID NO: 694
  source: /note="Description of Artificial Sequence: Synthetic polypeptide"

SEQ ID NO: 1233 - protein, 11 aa, Artificial Sequence
  source: /note="Description of Artificial Sequence: Synthetic peptide"
  VARIANT (7)..(7): /replace="F" or "T" or "A" or "S"
  VARIANT (8)..(8): /replace="S" or "Y"
  SITE (1)..(11): /note="Variant residues given in the sequence have no preference with respect to those in the annotations for variant positions"
RASQDIYNYLN

SEQ ID NO: 1234 - protein, 7 aa, Artificial Sequence
  source: /note="Description of Artificial Sequence: Synthetic peptide"
  VARIANT (2)..(2): /replace="S" or "A"
  VARIANT (4)..(4): /replace="M" or "G" or "S" or "E"
  VARIANT (6)..(6): /replace="H"
  VARIANT (7)..(7): /replace="S"
  SITE (1)..(7): /note="Variant residues given in the sequence have no preference with respect to those in the annotations for variant positions"
YTSRLET

SEQ ID NO: 1235 - protein, 9 aa, Artificial Sequence
  source: /note="Description of Artificial Sequence: Synthetic peptide"
  VARIANT (5)..(5): /replace="S" or "A" or "I"
  VARIANT (6)..(6): /replace="V"
  SITE (1)..(9): /note="Variant residues given in the sequence have no preference with respect to those in the annotations for variant positions"
QQGDTLPWT

SEQ ID NO: 1236 - protein, 118 aa, Artificial Sequence
  source: /note="Description of Artificial Sequence: Synthetic polypeptide"
EVQLVQSGAEVKKPGASVKVSCKASGYTFTSYLMHWVRQAPGQGLEWMGRIDPQSGGIKYAQKFQGRATLTVDTSTSTAYMELSRLRSDDTAVYYCARWDYGGYFDVWGQGTLVTVSS

SEQ ID NO: 1237 - protein, 5 aa, Artificial Sequence
  source: /note="Description of Artificial Sequence: Synthetic peptide"
  VARIANT (1)..(1): /replace="R" or "T"
  VARIANT (3)..(3): /replace="W" or "Y" or "D"
  VARIANT (4)..(4): /replace="L" or "V" or "T" or "I"
  VARIANT (5)..(5): /replace="Q" or "N" or "A"
  SITE (1)..(5): /note="Variant residues given in the sequence have no preference with respect to those in the annotations for variant positions"
SYLMH

SEQ ID NO: 1238 - protein, 17 aa, Artificial Sequence
  source: /note="Description of Artificial Sequence: Synthetic peptide"
  VARIANT (4)..(4): /replace="L"
  VARIANT (5)..(5): /replace="E" or "P" or "V" or "R" or "M" or "L" or "H" or "D"
  VARIANT (6)..(6): /replace="G" or "T" or "N"
  VARIANT (8)..(8): /replace="V" or "E"
  VARIANT (9)..(9): /replace="S" or "V" or "N" or "M" or "F"
  VARIANT (10)..(10): /replace="R" or "I" or "T" or "M"
  SITE (1)..(17): /note="Variant residues given in the sequence have no preference with respect to those in the annotations for variant positions"
RIDPQSGGIKYAQKFQG

SEQ ID NO: 1239 - protein, 9 aa, Artificial Sequence
  source: /note="Description of Artificial Sequence: Synthetic peptide"
  VARIANT (6)..(6): /replace="W" or "H"
  SITE (1)..(9): /note="Variant residues given in the sequence have no preference with respect to those in the annotations for variant positions"
WDYGGYFDV

SEQ ID NO: 1240 - protein, 107 aa, Artificial Sequence; identical to SEQ ID NO: 841
  source: /note="Description of Artificial Sequence: Synthetic polypeptide"

SEQ ID NO: 1241 - protein, 11 aa, Artificial Sequence
  source: /note="Description of Artificial Sequence: Synthetic peptide"
  VARIANT (7)..(7): /replace="Y" or "A"
  VARIANT (8)..(8): /replace="H" or "K"
  SITE (1)..(11): /note="Variant residues given in the sequence have no preference with respect to those in the annotations for variant positions"
RASQDITNYLN

SEQ ID NO: 1242 - protein, 7 aa, Artificial Sequence
  source: /note="Description of Artificial Sequence: Synthetic peptide"
  VARIANT (2)..(2): /replace="S"
  VARIANT (4)..(4): /replace="G" or "M" or "S" or "I"
  VARIANT (6)..(6): /replace="H"
  VARIANT (7)..(7): /replace="S"
  SITE (1)..(7): /note="Variant residues given in the sequence have no preference with respect to those in the annotations for variant positions"
YTSRLET

SEQ ID NO: 1243 - protein, 9 aa, Artificial Sequence
  source: /note="Description of Artificial Sequence: Synthetic peptide"
  VARIANT (5)..(5): /replace="I" or "A"
  SITE (1)..(9): /note="Variant residues given in the sequence have no preference with respect to those in the annotations for variant positions"
QQGDTLPWT

SEQ ID NO: 1244 - protein, 118 aa, Artificial Sequence
  source: /note="Description of Artificial Sequence: Synthetic polypeptide"
EVQLVQSGAEVKKPGASVKVSCKASGYTFTSYYMNWVRQAPGQGLEWMGRIDPQSGGIKYAQKFQGRATLTVDTSTSTAYMELSRLRSDDTAVYYCARWDYGGYFDVWGQGTLVTVSS

SEQ ID NO: 1245 - protein, 5 aa, Artificial Sequence
  source: /note="Description of Artificial Sequence: Synthetic peptide"
  VARIANT (1)..(1): /replace="R" or "T" or "G"
  VARIANT (3)..(3): /replace="L" or "W" or "D" or "F"
  VARIANT (4)..(4): /replace="L" or "I" or "V" or "T"
  VARIANT (5)..(5): /replace="Q" or "H" or "S"
  SITE (1)..(5): /note="Variant residues given in the sequence have no preference with respect to those in the annotations for variant positions"
SYYMN

SEQ ID NO: 1246 - protein, 17 aa, Artificial Sequence
  source: /note="Description of Artificial Sequence: Synthetic peptide"
  VARIANT (5)..(5): /replace="E" or "L" or "H"
  VARIANT (6)..(6): /replace="D" or "I" or "N" or "G"
  VARIANT (8)..(8): /replace="D" or "E"
  VARIANT (9)..(9): /replace="V" or "T" or "S" or "N" or "L"
  VARIANT (10)..(10): /replace="R" or "I"
  SITE (1)..(17): /note="Variant residues given in the sequence have no preference with respect to those in the annotations for variant positions"
RIDPQSGGIKYAQKFQG

SEQ ID NO: 1247 - protein, 9 aa, Artificial Sequence
  source: /note="Description of Artificial Sequence: Synthetic peptide"
WDYGGYFDV

SEQ ID NO: 1248 - protein, 107 aa, Artificial Sequence; identical to SEQ ID NO: 659
  source: /note="Description of Artificial Sequence: Synthetic polypeptide"

SEQ ID NO: 1249 - protein, 11 aa, Artificial Sequence
  source: /note="Description of Artificial Sequence: Synthetic peptide"
  VARIANT (8)..(8): /replace="H" or "K"
  SITE (1)..(11): /note="Variant residues given in the sequence have no preference with respect to those in the annotations for variant positions"
RASQDIWNYLN

SEQ ID NO: 1250 - protein, 7 aa, Artificial Sequence
  source: /note="Description of Artificial Sequence: Synthetic peptide"
  VARIANT (4)..(4): /replace="G" or "I" or "R" or "V"
  VARIANT (6)..(6): /replace="H"
  VARIANT (7)..(7): /replace="S"
  SITE (1)..(7): /note="Variant residues given in the sequence have no preference with respect to those in the annotations for variant positions"
YTSMLET

SEQ ID NO: 1251 - protein, 9 aa, Artificial Sequence
  source: /note="Description of Artificial Sequence: Synthetic peptide"
  VARIANT (5)..(5): /replace="S" or "N" or "A" or "M" or "I"
  SITE (1)..(9): /note="Variant residues given in the sequence have no preference with respect to those in the annotations for variant positions"
QQGDTLPWT

SEQ ID NO: 1252 - protein, 118 aa, Artificial Sequence; identical to SEQ ID NO: 922
  source: /note="Description of Artificial Sequence: Synthetic polypeptide"

SEQ ID NO: 1253 - protein, 5 aa, Artificial Sequence
  source: /note="Description of Artificial Sequence: Synthetic peptide"
  VARIANT (1)..(1): /replace="R" or "Y" or "N" or "K"
  VARIANT (3)..(3): /replace="W" or "Y"
  VARIANT (4)..(4): /replace="L"
  VARIANT (5)..(5): /replace="Q"
  SITE (1)..(5): /note="Variant residues given in the sequence have no preference with respect to those in the annotations for variant positions"
SYDMH

SEQ ID NO: 1254 - protein, 17 aa, Artificial Sequence
  source: /note="Description of Artificial Sequence: Synthetic peptide"
  VARIANT (5)..(5): /replace="D" or "F"
  VARIANT (6)..(6): /replace="D" or "T" or "N"
  VARIANT (8)..(8): /replace="D"
  VARIANT (9)..(9): /replace="V" or "T" or "S" or "F"
  VARIANT (10)..(10): /replace="R"
  SITE (1)..(17): /note="Variant residues given in the sequence have no preference with respect to those in the annotations for variant positions"
RIDPQSGGIKYAQKFQG

SEQ ID NO: 1255 - protein, 9 aa, Artificial Sequence
  source: /note="Description of Artificial Sequence: Synthetic peptide"
  VARIANT (1)..(1): /replace="Y"
  VARIANT (3)..(3): /replace="F"
  VARIANT (6)..(6): /replace="Q"
  SITE (1)..(9): /note="Variant residues given in the sequence have no preference with respect to those in the annotations for variant positions"
WDYGGYFDV

SEQ ID NO: 1256 - protein, 107 aa, Artificial Sequence; identical to SEQ ID NO: 955
  source: /note="Description of Artificial Sequence: Synthetic polypeptide"

SEQ ID NO: 1257 - protein, 11 aa, Artificial Sequence
  source: /note="Description of Artificial Sequence: Synthetic peptide"
  VARIANT (1)..(1): /replace="K"
  VARIANT (7)..(7): /replace="F"
  VARIANT (8)..(8): /replace="K"
  SITE (1)..(11): /note="Variant residues given in the sequence have no preference with respect to those in the annotations for variant positions"
RASQDIYNYLN

SEQ ID NO: 1258 - protein, 7 aa, Artificial Sequence
  source: /note="Description of Artificial Sequence: Synthetic peptide"
  VARIANT (4)..(4): /replace="I" or "L" or "G" or "H" or "Y" or "N"
  SITE (1)..(7): /note="Variant residues given in the sequence have no preference with respect to those in the annotations for variant positions"
YTSVLHS

SEQ ID NO: 1259 - protein, 9 aa, Artificial Sequence
  source: /note="Description of Artificial Sequence: Synthetic peptide"
  VARIANT (5)..(5): /replace="E" or "A" or "L"
  SITE (1)..(9): /note="Variant residues given in the sequence have no preference with respect to those in the annotations for variant positions"
QQGDTLPWT

SEQ ID NO: 1260 - protein, 118 aa, Artificial Sequence; identical to SEQ ID NO: 922
  source: /note="Description of Artificial Sequence: Synthetic polypeptide"

SEQ ID NO: 1261 - protein, 5 aa, Artificial Sequence
  source: /note="Description of Artificial Sequence: Synthetic peptide"
  VARIANT (1)..(1): /replace="Y" or "R" or "Q" or "N"
  VARIANT (4)..(4): /replace="L"
  VARIANT (5)..(5): /replace="N"
  SITE (1)..(5): /note="Variant residues given in the sequence have no preference with respect to those in the annotations for variant positions"
SYDMH

SEQ ID NO: 1262 - protein, 17 aa, Artificial Sequence
  source: /note="Description of Artificial Sequence: Synthetic peptide"
  VARIANT (6)..(6): /replace="D" or "T" or "V"
  VARIANT (8)..(8): /replace="D"
  VARIANT (9)..(9): /replace="V" or "T" or "Q"
  VARIANT (10)..(10): /replace="R"
  SITE (1)..(17): /note="Variant residues given in the sequence have no preference with respect to those in the annotations for variant positions"
RIDPQSGGIKYAQKFQG

SEQ ID NO: 1263 - protein, 9 aa, Artificial Sequence
  source: /note="Description of Artificial Sequence: Synthetic peptide"
  VARIANT (1)..(1): /replace="Y"
  VARIANT (6)..(6): /replace="Q" or "F"
  SITE (1)..(9): /note="Variant residues given in the sequence have no preference with respect to those in the annotations for variant positions"
WDYGGYFDV

SEQ ID NO: 1264 - protein, 107 aa, Artificial Sequence; identical to SEQ ID NO: 163
  source: /note="Description of Artificial Sequence: Synthetic polypeptide"

SEQ ID NO: 1265 - protein, 11 aa, Artificial Sequence
  source: /note="Description of Artificial Sequence: Synthetic peptide"
  VARIANT (7)..(7): /replace="F"
  VARIANT (8)..(8): /replace="K"
  SITE (1)..(11): /note="Variant residues given in the sequence have no preference with respect to those in the annotations for variant positions"
RASQDIYNYLN

SEQ ID NO: 1266 - protein, 7 aa, Artificial Sequence
  source: /note="Description of Artificial Sequence: Synthetic peptide"
  VARIANT (4)..(4): /replace="G" or "I" or "V" or "L" or "S" or "E"
  SITE (1)..(7): /note="Variant residues given in the sequence have no preference with respect to those in the annotations for variant positions"
YTSRLHS

SEQ ID NO: 1267 - protein, 9 aa, Artificial Sequence
  source: /note="Description of Artificial Sequence: Synthetic peptide"
  VARIANT (5)..(5): /replace="E" or "G" or "D" or "A"
  VARIANT (6)..(6): /replace="I"
  SITE (1)..(9): /note="Variant residues given in the sequence have no preference with respect to those in the annotations for variant positions"
QQGDTLPWT

SEQ ID NO: 1268 - protein, 118 aa, Artificial Sequence; identical to SEQ ID NO: 922
  source: /note="Description of Artificial Sequence: Synthetic polypeptide"

SEQ ID NO: 1269 - protein, 5 aa, Artificial Sequence
  source: /note="Description of Artificial Sequence: Synthetic peptide"
  VARIANT (1)..(1): /replace="F"
  VARIANT (3)..(3): /replace="W"
  VARIANT (4)..(4): /replace="I" or "L" or "V"
  VARIANT (5)..(5): /replace="S"
  SITE (1)..(5): /note="Variant residues given in the sequence have no preference with respect to those in the annotations for variant positions"
SYDMH

SEQ ID NO: 1270 - protein, 17 aa, Artificial Sequence
  source: /note="Description of Artificial Sequence: Synthetic peptide"
  VARIANT (6)..(6): /replace="N" or "T" or "G"
  VARIANT (8)..(8): /replace="D"
  VARIANT (9)..(9): /replace="T" or "D" or "S"
  VARIANT (10)..(10): /replace="V" or "R"
  SITE (1)..(17): /note="Variant residues given in the sequence have no preference with respect to those in the annotations for variant positions"
RIDPQSGGIKYAQKFQG

SEQ ID NO: 1271 - protein, 9 aa, Artificial Sequence
  source: /note="Description of Artificial Sequence: Synthetic peptide"
  VARIANT (1)..(1): /replace="Y"
  VARIANT (2)..(2): /replace="E"
  VARIANT (3)..(3): /replace="H" or "Q"
  VARIANT (4)..(4): /replace="A"
  SITE (1)..(9): /note="Variant residues given in the sequence have no preference with respect to those in the annotations for variant positions"
WDYGGYFDV

SEQ ID NO: 1272 - protein, 107 aa, Artificial Sequence; identical to SEQ ID NO: 163
  source: /note="Description of Artificial Sequence: Synthetic polypeptide"

SEQ ID NO: 1273 - protein, 11 aa, Artificial Sequence
  source: /note="Description of Artificial Sequence: Synthetic peptide"
  VARIANT (1)..(1): /replace="G"
  VARIANT (7)..(7): /replace="T" or "F"
  VARIANT (8)..(8): /replace="Y"
  SITE (1)..(11): /note="Variant residues given in the sequence have no preference with respect to those in the annotations for variant positions"
RASQDIYNYLN

SEQ ID NO: 1274 - protein, 7 aa, Artificial Sequence
  source: /note="Description of Artificial Sequence: Synthetic peptide"
  VARIANT (4)..(4): /replace="V" or "N" or "Y" or "I" or "H" or "A"
  SITE (1)..(7): /note="Variant residues given in the sequence have no preference with respect to those in the annotations for variant positions"
YTSRLHS

SEQ ID NO: 1275 - protein, 9 aa, Artificial Sequence
  source: /note="Description of Artificial Sequence: Synthetic peptide"
QQGDTLPWT

SEQ ID NO: 1276 - protein, 118 aa, Artificial Sequence; identical to SEQ ID NO: 922
  source: /note="Description of Artificial Sequence: Synthetic polypeptide"

SEQ ID NO: 1277 - protein, 5 aa, Artificial Sequence
  source: /note="Description of Artificial Sequence: Synthetic peptide"
  VARIANT (1)..(1): /replace="D" or "T" or "R" or "P" or "N" or "H" or "G" or "A"
  VARIANT (3)..(3): /replace="W" or "Q" or "E" or "F"
  VARIANT (4)..(4): /replace="L" or "V" or "I"
  VARIANT (5)..(5): /replace="Q" or "V" or "S"
  SITE (1)..(5): /note="Variant residues given in the sequence have no preference with respect to those in the annotations for variant positions"
SYDMH

SEQ ID NO: 1278 - protein, 17 aa, Artificial Sequence
  source: /note="Description of Artificial Sequence: Synthetic peptide"
  VARIANT (1)..(1): /replace="W"
  VARIANT (5)..(5): /replace="Y" or "V" or "K" or "I" or "D"
  VARIANT (6)..(6): /replace="G" or "R"
  VARIANT (8)..(8): /replace="S" or "D" or "N"
  VARIANT (9)..(9): /replace="Y" or "V" or "H" or "L" or "D"
  VARIANT (10)..(10): /replace="R" or "I" or "P" or "D" or "A"
  SITE (1)..(17): /note="Variant residues given in the sequence have no preference with respect to those in the annotations for variant positions"
RIDPQSGGIKYAQKFQG

SEQ ID NO: 1279 - protein, 9 aa, Artificial Sequence
  source: /note="Description of Artificial Sequence: Synthetic peptide"
  VARIANT (1)..(1): /replace="Y"
  VARIANT (3)..(3): /replace="H" or "Q" or "E"
  VARIANT (4)..(4): /replace="S" or "A"
  VARIANT (6)..(6): /replace="N" or "L" or "F"
  SITE (1)..(9): /note="Variant residues given in the sequence have no preference with respect to those in the annotations for variant positions"
WDYGGYFDV

SEQ ID NO: 1280 - protein, 107 aa, Artificial Sequence; identical to SEQ ID NO: 163
  source: /note="Description of Artificial Sequence: Synthetic polypeptide"

SEQ ID NO: 1281 - protein, 11 aa, Artificial Sequence
  source: /note="Description of Artificial Sequence: Synthetic peptide"
  VARIANT (7)..(7): /replace="T" or "F"
  VARIANT (8)..(8): /replace="S" or "Y" or "H" or "K"
  SITE (1)..(11): /note="Variant residues given in the sequence have no preference with respect to those in the annotations for variant positions"
RASQDIYNYLN

SEQ ID NO: 1282 - protein, 7 aa, Artificial Sequence
  source: /note="Description of Artificial Sequence: Synthetic peptide"
  VARIANT (4)..(4): /replace="N" or "Q" or "I" or "E" or "A"
  SITE (1)..(7): /note="Variant residues given in the sequence have no preference with respect to those in the annotations for variant positions"
YTSRLHS

SEQ ID NO: 1283 - protein, 9 aa, Artificial Sequence
  source: /note="Description of Artificial Sequence: Synthetic peptide"
  VARIANT (6)..(6): /replace="Q" or "V"
  SITE (1)..(9): /note="Variant residues given in the sequence have no preference with respect to those in the annotations for variant positions"
QQGDTLPWT

SEQ ID NO: 1284 - protein, 118 aa, Artificial Sequence; identical to SEQ ID NO: 922
  source: /note="Description of Artificial Sequence: Synthetic polypeptide"

SEQ ID NO: 1285 - protein, 5 aa, Artificial Sequence
  source: /note="Description of Artificial Sequence: Synthetic peptide"
  VARIANT (1)..(1): /replace="H" or "Y" or "Q"
  VARIANT (3)..(3): /replace="Y" or "L"
  VARIANT (4)..(4): /replace="L" or "I"
  VARIANT (5)..(5): /replace="N" or "Q"
  SITE (1)..(5): /note="Variant residues given in the sequence have no preference with respect to those in the annotations for variant positions"
SYDMH

SEQ ID NO: 1286 - protein, 17 aa, Artificial Sequence
  source: /note="Description of Artificial Sequence: Synthetic peptide"
  VARIANT (5)..(5): /replace="D" or "V" or "I" or "Y" or "P"
  VARIANT (6)..(6): /replace="D" or "T" or "G"
  VARIANT (8)..(8): /replace="D" or "S"
  VARIANT (9)..(9): /replace="T" or "V" or "S"
  VARIANT (10)..(10): /replace="R"
  SITE (1)..(17): /note="Variant residues given in the sequence have no preference with respect to those in the annotations for variant positions"
RIDPQSGGIKYAQKFQG

SEQ ID NO: 1287 - protein, 9 aa, Artificial Sequence
  source: /note="Description of Artificial Sequence: Synthetic peptide"
  VARIANT (2)..(2): /replace="H"
  VARIANT (3)..(3): /replace="T" or "H"
  VARIANT (6)..(6): /replace="Q"
  SITE (1)..(9): /note="Variant residues given in the sequence have no preference with respect to those in the annotations for variant positions"
WDYGGYFDV

SEQ ID NO: 1288 - protein, 107 aa, Artificial Sequence; identical to SEQ ID NO: 1026
  source: /note="Description of Artificial Sequence: Synthetic polypeptide"

SEQ ID NO: 1289 - protein, 11 aa, Artificial Sequence
  source: /note="Description of Artificial Sequence: Synthetic peptide"
  VARIANT (7)..(7): /replace="F" or "W"
  VARIANT (8)..(8): /replace="S" or "K"
  SITE (1)..(11): /note="Variant residues given in the sequence have no preference with respect to those in the annotations for variant positions"
RASQDIYNYLN

SEQ ID NO: 1290 - protein, 7 aa, Artificial Sequence
  source: /note="Description of Artificial Sequence: Synthetic peptide"
  VARIANT (4)..(4): /replace="R" or "H" or "V" or "G" or "N" or "E"
  SITE (1)..(7): /note="Variant residues given in the sequence have no preference with respect to those in the annotations for variant positions"
YTSILHS

SEQ ID NO: 1291 - protein, 9 aa, Artificial Sequence
  source: /note="Description of Artificial Sequence: Synthetic peptide"
  VARIANT (5)..(5): /replace="E" or "A"
  VARIANT (6)..(6): /replace="I"
  SITE (1)..(9): /note="Variant residues given in the sequence have no preference with respect to those in the annotations for variant positions"
QQGDTLPWT

SEQ ID NO: 1292 - protein, 5 aa, Artificial Sequence
  source: /note="Description of Artificial Sequence: Synthetic peptide"
SYDIH

SEQ ID NO: 1293 - protein, 17 aa, Artificial Sequence
  source: /note="Description of Artificial Sequence: Synthetic peptide"
RIDPQSGGIKYAQKFQG

SEQ ID NO: 1294 - protein, 9 aa, Artificial Sequence
  source: /note="Description of Artificial Sequence: Synthetic peptide"
WDYGGYFDV

SEQ ID NO: 1295 - protein, 118 aa, Artificial Sequence; identical to SEQ ID NO: 1007
  source: /note="Description of Artificial Sequence: Synthetic polypeptide"

SEQ ID NO: 1296 - protein, 226 aa, Artificial Sequence
  source: /note="Description of Artificial Sequence: Synthetic polypeptide"
EVQLVQSGAEVKKPGASVKVSCKASGYTFTSYDIHWVRQAPGQGLEWMGRIDPQSGGIKYAQKFQGRATLTVDTSTSTAYMELSRLRSDDTAVYYCARWDYGGYFDVWGQGTLVTVSSASTKGPSVFPLAPSSKSTSGGTAALGCLVKDYFPEPVTVSWNSGALTSGVHTFPAVLQSSGLYSLSSVVTVPSSSLGTQTYICNVNHKPSNTKVDKKVEPKSCDKTHT

SEQ ID NO: 1297 - protein, 11 aa, Artificial Sequence
  source: /note="Description of Artificial Sequence: Synthetic peptide"
RASQDITNYLN

SEQ ID NO: 1298 - protein, 7 aa, Artificial Sequence
  source: /note="Description of Artificial Sequence: Synthetic peptide"
YTSRLHS

SEQ ID NO: 1299 - protein, 9 aa, Artificial Sequence
  source: /note="Description of Artificial Sequence: Synthetic peptide"
QQGDTLPWT

SEQ ID NO: 1300 - protein, 107 aa, Artificial Sequence; identical to SEQ ID NO: 333
  source: /note="Description of Artificial Sequence: Synthetic polypeptide"

SEQ ID NO: 1301 - protein, 214 aa, Artificial Sequence; identical to SEQ ID NO: 334
  source: /note="Description of Artificial Sequence: Synthetic polypeptide"

SEQ ID NO: 1302 - protein, 5 aa, Artificial Sequence
  source: /note="Description of Artificial Sequence: Synthetic peptide"
SYDIH

SEQ ID NO: 1303 - protein, 17 aa, Artificial Sequence
  source: /note="Description of Artificial Sequence: Synthetic peptide"
RIDPYSGGIKYAQKFQG

SEQ ID NO: 1304 - protein, 9 aa, Artificial Sequence
  source: /note="Description of Artificial Sequence: Synthetic peptide"
WDYGGYFDV

SEQ ID NO: 1305 - protein, 118 aa, Artificial Sequence; identical to SEQ ID NO: 1045
  source: /note="Description of Artificial Sequence: Synthetic polypeptide"

SEQ ID NO: 1306 - protein, 226 aa, Artificial Sequence
  source: /note="Description of Artificial Sequence: Synthetic polypeptide"
EVQLVQSGAEVKKPGASVKVSCKASGYTFTSYDIHWVRQAPGQGLEWMGRIDPYSGGIKYAQKFQGRATLTVDTSTSTAYMELSRLRSDDTAVYYCARWDYGGYFDVWGQGTLVTVSSASTKGPSVFPLAPSSKSTSGGTAALGCLVKDYFPEPVTVSWNSGALTSGVHTFPAVLQSSGLYSLSSVVTVPSSSLGTQTYICNVNHKPSNTKVDKKVEPKSCDKTHT

SEQ ID NO: 1307 - protein, 11 aa, Artificial Sequence
  source: /note="Description of Artificial Sequence: Synthetic peptide"
RASQDITNYLN

SEQ ID NO: 1308 - protein, 7 aa, Artificial Sequence
  source: /note="Description of Artificial Sequence: Synthetic peptide"
YTSRLHS

SEQ ID NO: 1309 - protein, 9 aa, Artificial Sequence
  source: /note="Description of Artificial Sequence: Synthetic peptide"
QQGDTLPWT

SEQ ID NO: 1310 - protein, 107 aa, Artificial Sequence; identical to SEQ ID NO: 333
  source: /note="Description of Artificial Sequence: Synthetic polypeptide"

SEQ ID NO: 1311 - protein, 214 aa, Artificial Sequence; identical to SEQ ID NO: 334
  source: /note="Description of Artificial Sequence: Synthetic polypeptide"

SEQ ID NO: 1312 - protein, 5 aa, Artificial Sequence
  source: /note="Description of Artificial Sequence: Synthetic peptide"
SYDMH

SEQ ID NO: 1313 - protein, 17 aa, Artificial Sequence
  source: /note="Description of Artificial Sequence: Synthetic peptide"
RIDPQSGGIKYAQKFQG

SEQ ID NO: 1314 - protein, 9 aa, Artificial Sequence
  source: /note="Description of Artificial Sequence: Synthetic peptide"
WDYGGYFDV

SEQ ID NO: 1315 - protein, 118 aa, Artificial Sequence; identical to SEQ ID NO: 922
  source: /note="Description of Artificial Sequence: Synthetic polypeptide"

SEQ ID NO: 1316 - protein, 226 aa, Artificial Sequence
  source: /note="Description of Artificial Sequence: Synthetic polypeptide"
EVQLVQSGAEVKKPGASVKVSCKASGYTFTSYDMHWVRQAPGQGLEWMGRIDPQSGGIKYAQKFQGRATLTVDTSTSTAYMELSRLRSDDTAVYYCARWDYGGYFDVWGQGTLVTVSSASTKGPSVFPLAPSSKSTSGGTAALGCLVKDYFPEPVTVSWNSGALTSGVHTFPAVLQSSGLYSLSSVVTVPSSSLGTQTYICNVNHKPSNTKVDKKVEPKSCDKTHT

SEQ ID NO: 1317 - protein, 11 aa, Artificial Sequence
  source: /note="Description of Artificial Sequence: Synthetic peptide"
RASQDITNYLN

SEQ ID NO: 1318 - protein, 7 aa, Artificial Sequence
  source: /note="Description of Artificial Sequence: Synthetic peptide"
YTSRLHS

SEQ ID NO: 1319 - protein, 9 aa, Artificial Sequence
  source: /note="Description of Artificial Sequence: Synthetic peptide"
QQGDTLPWT

SEQ ID NO: 1320 - protein, 107 aa, Artificial Sequence; identical to SEQ ID NO: 333
  source: /note="Description of Artificial Sequence: Synthetic polypeptide"

SEQ ID NO: 1321 - protein, 214 aa, Artificial Sequence; identical to SEQ ID NO: 334
  source: /note="Description of Artificial Sequence: Synthetic polypeptide"

SEQ ID NO: 1322 - protein, 5 aa, Artificial Sequence
  source: /note="Description of Artificial Sequence: Synthetic peptide"
SYDMH

SEQ ID NO: 1323 - protein, 17 aa, Artificial Sequence
  source: /note="Description of Artificial Sequence: Synthetic peptide"
RIDPQSGGIKYAQKFQG

SEQ ID NO: 1324 - protein, 9 aa, Artificial Sequence
  source: /note="Description of Artificial Sequence: Synthetic peptide"
YDHGGYFDV

SEQ ID NO: 1325 - protein, 118 aa, Artificial Sequence; identical to SEQ ID NO: 1040
  source: /note="Description of Artificial Sequence: Synthetic polypeptide"

SEQ ID NO: 1326 - protein, 226 aa, Artificial Sequence
  source: /note="Description of Artificial Sequence: Synthetic polypeptide"
EVQLVQSGAEVKKPGASVKVSCKASGYTFTSYDMHWVRQAPGQGLEWMGRIDPQSGGIKYAQKFQGRATLTVDTSTSTAYMELSRLRSDDTAVYYCARYDHGGYFDVWGQGTLVTVSSASTKGPSVFPLAPSSKSTSGGTAALGCLVKDYFPEPVTVSWNSGALTSGVHTFPAVLQSSGLYSLSSVVTVPSSSLGTQTYICNVNHKPSNTKVDKKVEPKSCDKTHT

SEQ ID NO: 1327 - protein, 11 aa, Artificial Sequence
  source: /note="Description of Artificial Sequence: Synthetic peptide"
RASQDIYNYLN

SEQ ID NO: 1328 - protein, 7 aa, Artificial Sequence
  source: /note="Description of Artificial Sequence: Synthetic peptide"
YTSRLHS

SEQ ID NO: 1329 - protein, 9 aa, Artificial Sequence
  source: /note="Description of Artificial Sequence: Synthetic peptide"
QQGDTLPWT

SEQ ID NO: 1330 - protein, 107 aa, Artificial Sequence; identical to SEQ ID NO: 163
  source: /note="Description of Artificial Sequence: Synthetic polypeptide"

SEQ ID NO: 1331 - protein, 214 aa, Artificial Sequence; identical to SEQ ID NO: 164
  source: /note="Description of Artificial Sequence: Synthetic polypeptide"

SEQ ID NO: 1332 - protein, 5 aa, Artificial Sequence
  source: /note="Description of Artificial Sequence: Synthetic peptide"
SYQVH

SEQ ID NO: 1333 - protein, 17 aa, Artificial Sequence
  source: /note="Description of Artificial Sequence: Synthetic peptide"
RIDPQSGGIKYAQKFQG

SEQ ID NO: 1334 - protein, 8 aa, Artificial Sequence
  source: /note="Description of Artificial Sequence: Synthetic peptide"
DYGGYFDV

SEQ ID NO: 1335 - protein, 118 aa, Artificial Sequence; identical to SEQ ID NO: 1090
  source: /note="Description of Artificial Sequence: Synthetic polypeptide"

SEQ ID NO: 1336 - protein, 226 aa, Artificial Sequence
  source: /note="Description of Artificial Sequence: Synthetic polypeptide"
EVQLVQSGAEVKKPGASVKVSCKASGYTFTSYQVHWVRQAPGQGLEWMGRIDPQSGGIKYAQKFQGRATLTVDTSTSTAYMELSRLRSDDTAVYYCARWDYGGYFDVWGQGTLVTVSSASTKGPSVFPLAPSSKSTSGGTAALGCLVKDYFPEPVTVSWNSGALTSGVHTFPAVLQSSGLYSLSSVVTVPSSSLGTQTYICNVNHKPSNTKVDKKVEPKSCDKTHT

SEQ ID NO: 1337 - protein, 11 aa, Artificial Sequence
  source: /note="Description of Artificial Sequence: Synthetic peptide"
RASQDIYNYLN

SEQ ID NO: 1338 - protein, 7 aa, Artificial Sequence
  source: /note="Description of Artificial Sequence: Synthetic peptide"
YTSRLHS

SEQ ID NO: 1339 - protein, 9 aa, Artificial Sequence
  source: /note="Description of Artificial Sequence: Synthetic peptide"
QQGDTLPWT

SEQ ID NO: 1340 - protein, 107 aa, Artificial Sequence; identical to SEQ ID NO: 163
  source: /note="Description of Artificial Sequence: Synthetic polypeptide"

SEQ ID NO: 1341 - protein, 214 aa, Artificial Sequence; identical to SEQ ID NO: 164
  source: /note="Description of Artificial Sequence: Synthetic polypeptide"

SEQ ID NO: 1342 - protein, 5 aa, Artificial Sequence
  source: /note="Description of Artificial Sequence: Synthetic peptide"
SYDMH

SEQ ID NO: 1343 - protein, 17 aa, Artificial Sequence
  source: /note="Description of Artificial Sequence: Synthetic peptide"
RIDPQSGGEKYAQKFQG

SEQ ID NO: 1344 - protein, 9 aa, Artificial Sequence
  source: /note="Description of Artificial Sequence: Synthetic peptide"
YDYGGYFDV

SEQ ID NO: 1345 - protein, 118 aa, Artificial Sequence; identical to SEQ ID NO: 1050
  source: /note="Description of Artificial Sequence: Synthetic polypeptide"

SEQ ID NO: 1346 - protein, 226 aa, Artificial Sequence
  source: /note="Description of Artificial Sequence: Synthetic polypeptide"
EVQLVQSGAEVKKPGASVKVSCKASGYTFTSYDMHWVRQAPGQGLEWMGRIDPQSGGEKYAQKFQGRATLTVDTSTSTAYMELSRLRSDDTAVYYCARYDYGGYFDVWGQGTLVTVSSASTKGPSVFPLAPSSKSTSGGTAALGCLVKDYFPEPVTVSWNSGALTSGVHTFPAVLQSSGLYSLSSVVTVPSSSLGTQTYICNVNHKPSNTKVDKKVEPKSCDKTHT

SEQ ID NO: 1347 - protein, 11 aa, Artificial Sequence
  source: /note="Description of Artificial Sequence: Synthetic peptide"
RASQDIYNYLN

SEQ ID NO: 1348 - protein, 7 aa, Artificial Sequence
  source: /note="Description of Artificial Sequence: Synthetic peptide"
YTSRLHS

SEQ ID NO: 1349 - protein, 9 aa, Artificial Sequence
  source: /note="Description of Artificial Sequence: Synthetic peptide"
QQGDTLPWT

SEQ ID NO: 1350 - protein, 107 aa, Artificial Sequence; identical to SEQ ID NO: 163
  source: /note="Description of Artificial Sequence: Synthetic polypeptide"

SEQ ID NO: 1351 - protein, 214 aa, Artificial Sequence; identical to SEQ ID NO: 164
  source: /note="Description of Artificial Sequence: Synthetic polypeptide"

SEQ ID NO: 1352 - protein, 5 aa, Artificial Sequence
  source: /note="Description of Artificial Sequence: Synthetic peptide"
DYDMH

SEQ ID NO: 1353 - protein, 17 aa, Artificial Sequence
  source: /note="Description of Artificial Sequence: Synthetic peptide"
RIDPQSGDHDYAQKFQG

SEQ ID NO: 1354 - protein, 9 aa, Artificial Sequence
  source: /note="Description of Artificial Sequence: Synthetic peptide"
YDHGGYFDV

SEQ ID NO: 1355 - protein, 118 aa, Artificial Sequence; identical to SEQ ID NO: 1097
  source: /note="Description of Artificial Sequence: Synthetic polypeptide"

SEQ ID NO: 1356 - protein, 226 aa, Artificial Sequence
  source: /note="Description of Artificial Sequence: Synthetic polypeptide"
EVQLVQSGAEVKKPGASVKVSCKASGYTFTDYDMHWVRQAPGQGLEWMGRIDPQSGDHDYAQKFQGRATLTVDTSTSTAYMELSRLRSDDTAVYYCARYDHGGYFDVWGQGTLVTVSSASTKGPSVFPLAPSSKSTSGGTAALGCLVKDYFPEPVTVSWNSGALTSGVHTFPAVLQSSGLYSLSSVVTVPSSSLGTQTYICNVNHKPSNTKVDKKVEPKSCDKTHT

SEQ ID NO: 1357 - protein, 11 aa, Artificial Sequence
  source: /note="Description of Artificial Sequence: Synthetic peptide"
RASQDIYNYLN

SEQ ID NO: 1358 - protein, 7 aa, Artificial Sequence
  source: /note="Description of Artificial Sequence: Synthetic peptide"
YTSRLHS

SEQ ID NO: 1359 - protein, 9 aa, Artificial Sequence
  source: /note="Description of Artificial Sequence: Synthetic peptide"
QQGDTLPWT

SEQ ID NO: 1360 - protein, 107 aa, Artificial Sequence; identical to SEQ ID NO: 163
  source: /note="Description of Artificial Sequence: Synthetic polypeptide"

SEQ ID NO: 1361 - protein, 214 aa, Artificial Sequence; identical to SEQ ID NO: 164
  source: /note="Description of Artificial Sequence: Synthetic polypeptide"

SEQ ID NO: 1362 - protein, 5 aa, Artificial Sequence
  source: /note="Description of Artificial Sequence: Synthetic peptide"
SYDMH

SEQ ID NO: 1363 - protein, 17 aa, Artificial Sequence
  source: /note="Description of Artificial Sequence: Synthetic peptide"
RIDPYGGGIKYAQKFQG

SEQ ID NO: 1364 - protein, 9 aa, Artificial Sequence
  source: /note="Description of Artificial Sequence: Synthetic peptide"
YDHGGYFDV

SEQ ID NO: 1365 - protein, 118 aa, Artificial Sequence; identical to SEQ ID NO: 1102
  source: /note="Description of Artificial Sequence: Synthetic polypeptide"

SEQ ID NO: 1366 - protein, 226 aa, Artificial Sequence
  source: /note="Description of Artificial Sequence: Synthetic polypeptide"
EVQLVQSGAEVKKPGASVKVSCKASGYTFTSYDMHWVRQAPGQGLEWMGRIDPYGGGIKYAQKFQGRATLTVDTSTSTAYMELSRLRSDDTAVYYCARYDHGGYFDVWGQGTLVTVSSASTKGPSVFPLAPSSKSTSGGTAALGCLVKDYFPEPVTVSWNSGALTSGVHTFPAVLQSSGLYSLSSVVTVPSSSLGTQTYICNVNHKPSNTKVDKKVEPKSCDKTHT

SEQ ID NO: 1367 - protein, 11 aa, Artificial Sequence
  source: /note="Description of Artificial Sequence: Synthetic peptide"
RASQDIYNYLN

SEQ ID NO: 1368 - protein, 7 aa, Artificial Sequence
  source: /note="Description of Artificial Sequence: Synthetic peptide"
YTSRLHS

SEQ ID NO: 1369 - protein, 9 aa, Artificial Sequence
  source: /note="Description of Artificial Sequence: Synthetic peptide"
QQGDTLPWT

SEQ ID NO: 1370 - protein, 107 aa, Artificial Sequence; identical to SEQ ID NO: 163
  source: /note="Description of Artificial Sequence: Synthetic polypeptide"

SEQ ID NO: 1371 - protein, 214 aa, Artificial Sequence; identical to SEQ ID NO: 164
  source: /note="Description of Artificial Sequence: Synthetic polypeptide"

SEQ ID NO: 1372 - protein, 5 aa, Artificial Sequence
  source: /note="Description of Artificial Sequence: Synthetic peptide"
FYDIH

SEQ ID NO: 1373 - protein, 17 aa, Artificial Sequence
  source: /note="Description of Artificial Sequence: Synthetic peptide"
RIDPQSGGIKYAQKFQG

SEQ ID NO: 1374 - protein, 9 aa, Artificial Sequence
  source: /note="Description of Artificial Sequence: Synthetic peptide"
WDYGGYFDV

SEQ ID NO: 1375 - protein, 118 aa, Artificial Sequence; identical to SEQ ID NO: 1043
  source: /note="Description of Artificial Sequence: Synthetic polypeptide"

SEQ ID NO: 1376 - protein, 226 aa, Artificial Sequence
  source: /note="Description of Artificial Sequence: Synthetic polypeptide"
EVQLVQSGAEVKKPGASVKVSCKASGYTFTFYDIHWVRQAPGQGLEWMGRIDPQSGGIKYAQKFQGRATLTVDTSTSTAYMELSRLRSDDTAVYYCARWDYGGYFDVWGQGTLVTVSSASTKGPSVFPLAPSSKSTSGGTAALGCLVKDYFPEPVTVSWNSGALTSGVHTFPAVLQSSGLYSLSSVVTVPSSSLGTQTYICNVNHKPSNTKVDKKVEPKSCDKTHT

SEQ ID NO: 1377 - protein, 11 aa, Artificial Sequence
  source: /note="Description of Artificial Sequence: Synthetic peptide"
RASQDIYNYLN

SEQ ID NO: 1378 - protein, 7 aa, Artificial Sequence
  source: /note="Description of Artificial Sequence: Synthetic peptide"
YTSRLHS

SEQ ID NO: 1379 - protein, 9 aa, Artificial Sequence
  source: /note="Description of Artificial Sequence: Synthetic peptide"
QQGDTLPWT

SEQ ID NO: 1380 - protein, 107 aa, Artificial Sequence; identical to SEQ ID NO: 163
  source: /note="Description of Artificial Sequence: Synthetic polypeptide"

SEQ ID NO: 1381 - protein, 214 aa, Artificial Sequence; identical to SEQ ID NO: 164
  source: /note="Description of Artificial Sequence: Synthetic polypeptide"

SEQ ID NO: 1382 - protein, 5 aa, Artificial Sequence
  source: /note="Description of Artificial Sequence: Synthetic peptide"
TYWMH

SEQ ID NO: 1383 - protein, 17 aa, Artificial Sequence
  source: /note="Description of Artificial Sequence: Synthetic peptide"
RIDPQSGGSKYAQKFQG

SEQ ID NO: 1384 - protein, 9 aa, Artificial Sequence
  source: /note="Description of Artificial Sequence: Synthetic peptide"
WDYGGYFDV

SEQ ID NO: 1385 - protein, 118 aa, Artificial Sequence; identical to SEQ ID NO: 1066
  source: /note="Description of Artificial Sequence: Synthetic polypeptide"

SEQ ID NO: 1386 - protein, 226 aa, Artificial Sequence
  source: /note="Description of Artificial Sequence: Synthetic polypeptide"
EVQLVQSGAEVKKPGASVKVSCKASGYTFTTYWMHWVRQAPGQGLEWMGRIDPQSGGSKYAQKFQGRATLTVDTSTSTAYMELSRLRSDDTAVYYCARWDYGGYFDVWGQGTLVTVSSASTKGPSVFPLAPSSKSTSGGTAALGCLVKDYFPEPVTVSWNSGALTSGVHTFPAVLQSSGLYSLSSVVTVPSSSLGTQTYICNVNHKPSNTKVDKKVEPKSCDKTHT

SEQ ID NO: 1387 - protein, 11 aa, Artificial Sequence
  source: /note="Description of Artificial Sequence: Synthetic peptide"
RASQDIYNYLN

SEQ ID NO: 1388 - protein, 7 aa, Artificial Sequence
  source: /note="Description of Artificial Sequence: Synthetic peptide"
YTSHLHS

SEQ ID NO: 1389 - protein, 9 aa, Artificial Sequence
  source: /note="Description of Artificial Sequence: Synthetic peptide"
QQGDTLPWT

SEQ ID NO: 1390 - protein, 107 aa, Artificial Sequence; identical to SEQ ID NO: 1088
  source: /note="Description of Artificial Sequence: Synthetic polypeptide"

SEQ ID NO: 1391 - protein, 214 aa, Artificial Sequence
  source: /note="Description of Artificial Sequence: Synthetic polypeptide"
DIQMTQSPSSLSASVGDRVTITCRASQDIYNYLNWYQQKPGKAVKLLIYYTSHLHSGVPSRFSGSGSGTDYTLTISSLQPEDFATYFCQQGDTLPWTFGQGTKLEIKRTVAAPSVFIFPPSDEQLKSGTASVVCLLNNFYPREAKVQWKVDNALQSGNSQESVTEQDSKDSTYSLSSTLTLSKADYEKHKVYACEVTHQGLSSPVTKSFNRGEC

SEQ ID NO: 1392 - protein, 5 aa, Artificial Sequence
  source: /note="Description of Artificial Sequence: Synthetic peptide"
SYDLH

SEQ ID NO: 1393 - protein, 17 aa, Artificial Sequence
  source: /note="Description of Artificial Sequence: Synthetic peptide"
RIDPQSGGIKYAQKFQG

SEQ ID NO: 1394 - protein, 9 aa, Artificial Sequence
  source: /note="Description of Artificial Sequence: Synthetic peptide"
YDQGGYFDV

SEQ ID NO: 1395 - protein, 118 aa, Artificial Sequence; identical to SEQ ID NO: 1110
  source: /note="Description of Artificial Sequence: Synthetic polypeptide"

SEQ ID NO: 1396 - protein, 226 aa, Artificial Sequence
  source: /note="Description of Artificial Sequence: Synthetic polypeptide"
EVQLVQSGAEVKKPGASVKVSCKASGYTFTSYDLHWVRQAPGQGLEWMGRIDPQSGGIKYAQKFQGRATLTVDTSTSTAYMELSRLRSDDTAVYYCARYDQGGYFDVWGQGTLVTVSSASTKGPSVFPLAPSSKSTSGGTAALGCLVKDYFPEPVTVSWNSGALTSGVHTFPAVLQSSGLYSLSSVVTVPSSSLGTQTYICNVNHKPSNTKVDKKVEPKSCDKTHT

SEQ ID NO: 1397 - protein, 11 aa, Artificial Sequence
  source: /note="Description of Artificial Sequence: Synthetic peptide"
RASQDIYYYLN

SEQ ID NO: 1398 - protein, 7 aa, Artificial Sequence
  source: /note="Description of Artificial Sequence: Synthetic peptide"
YTSRLHS

SEQ ID NO: 1399 - protein, 9 aa, Artificial Sequence
  source: /note="Description of Artificial Sequence: Synthetic peptide"
QQGDTLPWT

SEQ ID NO: 1400 - protein, 107 aa, Artificial Sequence; identical to SEQ ID NO: 1081
  source: /note="Description of Artificial Sequence: Synthetic polypeptide"

SEQ ID NO: 1401 - protein, 214 aa, Artificial Sequence
  source: /note="Description of Artificial Sequence: Synthetic polypeptide"
DIQMTQSPSSLSASVGDRVTITCRASQDIYYYLNWYQQKPGKAVKLLIYYTSRLHSGVPSRFSGSGSGTDYTLTISSLQPEDFATYFCQQGDTLPWTFGQGTKLEIKRTVAAPSVFIFPPSDEQLKSGTASVVCLLNNFYPREAKVQWKVDNALQSGNSQESVTEQDSKDSTYSLSSTLTLSKADYEKHKVYACEVTHQGLSSPVTKSFNRGEC

SEQ ID NO: 1402 - protein, 5 aa, Artificial Sequence
  source: /note="Description of Artificial Sequence: Synthetic peptide"
SYDMH

SEQ ID NO: 1403 - protein, 17 aa, Artificial Sequence
  source: /note="Description of Artificial Sequence: Synthetic peptide"
RIDPQTGGIKYAQKFQG

SEQ ID NO: 1404 - protein, 9 aa, Artificial Sequence
  source: /note="Description of Artificial Sequence: Synthetic peptide"
WDHGGYFDV

SEQ ID NO: 1405 - protein, 118 aa, Artificial Sequence; identical to SEQ ID NO: 1060
  source: /note="Description of Artificial Sequence: Synthetic polypeptide"

SEQ ID NO: 1406 - protein, 226 aa, Artificial Sequence
  source: /note="Description of Artificial Sequence: Synthetic polypeptide"
EVQLVQSGAEVKKPGASVKVSCKASGYTFTSYDMHWVRQAPGQGLEWMGRIDPQTGGIKYAQKFQGRATLTVDTSTSTAYMELSRLRSDDTAVYYCARWDHGGYFDVWGQGTLVTVSSASTKGPSVFPLAPSSKSTSGGTAALGCLVKDYFPEPVTVSWNSGALTSGVHTFPAVLQSSGLYSLSSVVTVPSSSLGTQTYICNVNHKPSNTKVDKKVEPKSCDKTHT

SEQ ID NO: 1407 - protein, 11 aa, Artificial Sequence
  source: /note="Description of Artificial Sequence: Synthetic peptide"
RASQDIYNYLN

SEQ ID NO: 1408 - protein, 7 aa, Artificial Sequence
  source: /note="Description of Artificial Sequence: Synthetic peptide"
YTSRLHS

SEQ ID NO: 1409 - protein, 9 aa, Artificial Sequence
  source: /note="Description of Artificial Sequence: Synthetic peptide"
QQGDTQPWT

SEQ ID NO: 1410 - protein, 107 aa, Artificial Sequence; identical to SEQ ID NO: 1084
  source: /note="Description of Artificial Sequence: Synthetic polypeptide"

SEQ ID NO: 1411 - protein, 214 aa, Artificial Sequence
  source: /note="Description of Artificial Sequence: Synthetic polypeptide"
DIQMTQSPSSLSASVGDRVTITCRASQDIYNYLNWYQQKPGKAVKLLIYYTSRLHSGVPSRFSGSGSGTDYTLTISSLQPEDFATYFCQQGDTQPWTFGQGTKLEIKRTVAAPSVFIFPPSDEQLKSGTASVVCLLNNFYPREAKVQWKVDNALQSGNSQESVTEQDSKDSTYSLSSTLTLSKADYEKHKVYACEVTHQGLSSPVTKSFNRGEC

SEQ ID NO: 1412 - protein, 5 aa, Artificial Sequence
  source: /note="Description of Artificial Sequence: Synthetic peptide"
SYDMH

SEQ ID NO: 1413 - protein, 17 aa, Artificial Sequence
  source: /note="Description of Artificial Sequence: Synthetic peptide"
RIDPQSGGIKYAQKFQG

SEQ ID NO: 1414 - protein, 9 aa, Artificial Sequence
  source: /note="Description of Artificial Sequence: Synthetic peptide"
WDYGGYFDV

SEQ ID NO: 1415 - protein, 118 aa, Artificial Sequence; identical to SEQ ID NO: 922
  source: /note="Description of Artificial Sequence: Synthetic polypeptide"

SEQ ID NO: 1416 - protein, 226 aa, Artificial Sequence; identical to SEQ ID NO: 1316
  source: /note="Description of Artificial Sequence: Synthetic polypeptide"

SEQ ID NO: 1417 - protein, 11 aa, Artificial Sequence
  source: /note="Description of Artificial Sequence: Synthetic peptide"
RASQDIYNYLN

SEQ ID NO: 1418 - protein, 7 aa, Artificial Sequence
  source: /note="Description of Artificial Sequence: Synthetic peptide"
YTSVLHS

SEQ ID NO: 1419 - protein, 9 aa, Artificial Sequence
  source: /note="Description of Artificial Sequence: Synthetic peptide"
QQGDTLPWT

SEQ ID NO: 1420 - protein, 107 aa, Artificial Sequence; identical to SEQ ID NO: 955
  source: /note="Description of Artificial Sequence: Synthetic polypeptide"

SEQ ID NO: 1421 - protein, 214 aa, Artificial Sequence
  source: /note="Description of Artificial Sequence: Synthetic polypeptide"
DIQMTQSPSSLSASVGDRVTITCRASQDIYNYLNWYQQKPGKAVKLLIYYTSVLHSGVPSRFSGSGSGTDYTLTISSLQPEDFATYFCQQGDTLPWTFGQGTKLEIKRTVAAPSVFIFPPSDEQLKSGTASVVCLLNNFYPREAKVQWKVDNALQSGNSQESVTEQDSKDSTYSLSSTLTLSKADYEKHKVYACEVTHQGLSSPVTKSFNRGEC

SEQ ID NO: 1422 - protein, 5 aa, Artificial Sequence
  source: /note="Description of Artificial Sequence: Synthetic peptide"
SYWMQ

SEQ ID NO: 1423 - protein, 17 aa, Artificial Sequence
  source: /note="Description of Artificial Sequence: Synthetic peptide"
RIDPQDGDIKYAQKFQG

SEQ ID NO: 1424 - protein, 9 aa, Artificial Sequence
  source: /note="Description of Artificial Sequence: Synthetic peptide"
YDYGGYFDV

SEQ ID NO: 1425 - protein, 118 aa, Artificial Sequence; identical to SEQ ID NO: 937
  source: /note="Description of Artificial Sequence: Synthetic polypeptide"

SEQ ID NO: 1426 - protein, 226 aa, Artificial Sequence
  source: /note="Description of Artificial Sequence: Synthetic polypeptide"
EVQLVQSGAEVKKPGASVKVSCKASGYTFTSYWMQWVRQAPGQGLEWMGRIDPQDGDIKYAQKFQGRATLTVDTSTSTAYMELSRLRSDDTAVYYCARYDYGGYFDVWGQGTLVTVSSASTKGPSVFPLAPSSKSTSGGTAALGCLVKDYFPEPVTVSWNSGALTSGVHTFPAVLQSSGLYSLSSVVTVPSSSLGTQTYICNVNHKPSNTKVDKKVEPKSCDKTHT

SEQ ID NO: 1427 - protein, 11 aa, Artificial Sequence
  source: /note="Description of Artificial Sequence: Synthetic peptide"
RASQDIYNYLN

SEQ ID NO: 1428 - protein, 7 aa, Artificial Sequence
  source: /note="Description of Artificial Sequence: Synthetic peptide"
YTSVLHS

SEQ ID NO: 1429 - protein, 9 aa, Artificial Sequence
  source: /note="Description of Artificial Sequence: Synthetic peptide"
QQGDTLPWT

SEQ ID NO: 1430 - protein, 107 aa, Artificial Sequence; identical to SEQ ID NO: 955
  source: /note="Description of Artificial Sequence: Synthetic polypeptide"

SEQ ID NO: 1431 - protein, 214 aa, Artificial Sequence; identical to SEQ ID NO: 1421
  source: /note="Description of Artificial Sequence: Synthetic polypeptide"

SEQ ID NO: 1432 - protein, 5 aa, Artificial Sequence
  source: /note="Description of Artificial Sequence: Synthetic peptide"
SYDMH

SEQ ID NO: 1433 - protein, 17 aa, Artificial Sequence
  source: /note="Description of Artificial Sequence: Synthetic peptide"
RIDPQSGGTKYAQKFQG

SEQ ID NO: 1434 - protein, 9 aa, Artificial Sequence
  source: /note="Description of Artificial Sequence: Synthetic peptide"
WDYGGYFDV

SEQ ID NO: 1435 - protein, 118 aa, Artificial Sequence; identical to SEQ ID NO: 945
  source: /note="Description of Artificial Sequence: Synthetic polypeptide"

SEQ ID NO: 1436 - protein, 226 aa, Artificial Sequence
  source: /note="Description of Artificial Sequence: Synthetic polypeptide"
EVQLVQSGAEVKKPGASVKVSCKASGYTFTSYDMHWVRQAPGQGLEWMGRIDPQSGGTKYAQKFQGRATLTVDTSTSTAYMELSRLRSDDTAVYYCARWDYGGYFDVWGQGTLVTVSSASTKGPSVFPLAPSSKSTSGGTAALGCLVKDYFPEPVTVSWNSGALTSGVHTFPAVLQSSGLYSLSSVVTVPSSSLGTQTYICNVNHKPSNTKVDKKVEPKSCDKTHT

SEQ ID NO: 1437 - protein, 11 aa, Artificial Sequence
  source: /note="Description of Artificial Sequence: Synthetic peptide"
RASQDIYNYLN

SEQ ID NO: 1438 - protein, 7 aa, Artificial Sequence
  source: /note="Description of Artificial Sequence: Synthetic peptide"
YTSVLHS

SEQ ID NO: 1439 - protein, 9 aa, Artificial Sequence
  source: /note="Description of Artificial Sequence: Synthetic peptide"
QQGDTLPWT

SEQ ID NO: 1440 - protein, 107 aa, Artificial Sequence; identical to SEQ ID NO: 955
  source: /note="Description of Artificial Sequence: Synthetic polypeptide"

SEQ ID NO: 1441 - protein, 214 aa, Artificial Sequence; identical to SEQ ID NO: 1421
  source: /note="Description of Artificial Sequence: Synthetic polypeptide"

SEQ ID NO: 1442 - protein, 5 aa, Artificial Sequence
  source: /note="Description of Artificial Sequence: Synthetic peptide"
SYDMH

SEQ ID NO: 1443 - protein, 17 aa, Artificial Sequence
  source: /note="Description of Artificial Sequence: Synthetic peptide"
RIDPQTGDIKYAQKFQG

SEQ ID NO: 1444 - protein, 9 aa, Artificial Sequence
  source: /note="Description of Artificial Sequence: Synthetic peptide"
WDYGGQFDV

SEQ ID NO: 1445 - protein, 118 aa, Artificial Sequence; identical to SEQ ID NO: 979
  source: /note="Description of Artificial Sequence: Synthetic polypeptide"

SEQ ID NO: 1446 - protein, 226 aa, Artificial Sequence
  source: /note="Description of Artificial Sequence: Synthetic polypeptide"
EVQLVQSGAEVKKPGASVKVSCKASGYTFTSYDMHWVRQAPGQGLEWMGRIDPQTGDIKYAQKFQGRATLTVDTSTSTAYMELSRLRSDDTAVYYCARWDYGGQFDVWGQGTLVTVSSASTKGPSVFPLAPSSKSTSGGTAALGCLVKDYFPEPVTVSWNSGALTSGVHTFPAVLQSSGLYSLSSVVTVPSSSLGTQTYICNVNHKPSNTKVDKKVEPKSCDKTHT

SEQ ID NO: 1447 - protein, 11 aa, Artificial Sequence
  source: /note="Description of Artificial Sequence: Synthetic peptide"
RASQDIYNYLN

SEQ ID NO: 1448 - protein, 7 aa, Artificial Sequence
  source: /note="Description of Artificial Sequence: Synthetic peptide"
YTSGLHS

SEQ ID NO: 1449 - protein, 9 aa, Artificial Sequence
  source: /note="Description of Artificial Sequence: Synthetic peptide"
QQGDTLPWT

SEQ ID NO: 1450 - protein, 107 aa, Artificial Sequence; identical to SEQ ID NO: 1011
  source: /note="Description of Artificial Sequence: Synthetic polypeptide"

SEQ ID NO: 1451 - protein, 214 aa, Artificial Sequence
  source: /note="Description of Artificial Sequence: Synthetic polypeptide"
DIQMTQSPSSLSASVGDRVTITCRASQDIYNYLNWYQQKPGKAVKLLIYYTSGLHSGVPSRFSGSGSGTDYTLTISSLQPEDFATYFCQQGDTLPWTFGQGTKLEIKRTVAAPSVFIFPPSDEQLKSGTASVVCLLNNFYPREAKVQWKVDNALQSGNSQESVTEQDSKDSTYSLSSTLTLSKADYEKHKVYACEVTHQGLSSPVTKSFNRGEC

SEQ ID NO: 1452 - protein, 5 aa, Artificial Sequence
  source: /note="Description of Artificial Sequence: Synthetic peptide"
QYDMH

SEQ ID NO: 1453 - protein, 17 aa, Artificial Sequence
  source: /note="Description of Artificial Sequence: Synthetic peptide"
RIDPQSGGIKYAQKFQG

SEQ ID NO: 1454 - protein, 9 aa, Artificial Sequence
  source: /note="Description of Artificial Sequence: Synthetic peptide"
YDYGGYFDV

SEQ ID NO: 1455 - protein, 118 aa, Artificial Sequence; identical to SEQ ID NO: 993
  source: /note="Description of Artificial Sequence: Synthetic polypeptide"

SEQ ID NO: 1456 - protein, 226 aa, Artificial Sequence
  source: /note="Description of Artificial Sequence: Synthetic polypeptide"
EVQLVQSGAEVKKPGASVKVSCKASGYTFTQYDMHWVRQAPGQGLEWMGRIDPQSGGIKYAQKFQGRATLTVDTSTSTAYMELSRLRSDDTAVYYCARYDYGGYFDVWGQGTLVTVSSASTKGPSVFPLAPSSKSTSGGTAALGCLVKDYFPEPVTVSWNSGALTSGVHTFPAVLQSSGLYSLSSVVTVPSSSLGTQTYICNVNHKPSNTKVDKKVEPKSCDKTHT

SEQ ID NO: 1457 - protein, 11 aa, Artificial Sequence
  source: /note="Description of Artificial Sequence: Synthetic peptide"
RASQDIYNYLN

SEQ ID NO: 1458 - protein, 7 aa, Artificial Sequence
  source: /note="Description of Artificial Sequence: Synthetic peptide"
YTSILHS

SEQ ID NO: 1459 - protein, 9 aa, Artificial Sequence
  source: /note="Description of Artificial Sequence: Synthetic peptide"
QQGDTLPWT

SEQ ID NO: 1460 - protein, 107 aa, Artificial Sequence; identical to SEQ ID NO: 1026
  source: /note="Description of Artificial Sequence: Synthetic polypeptide"

SEQ ID NO: 1461 - protein, 214 aa, Artificial Sequence
  source: /note="Description of Artificial Sequence: Synthetic polypeptide"
DIQMTQSPSSLSASVGDRVTITCRASQDIYNYLNWYQQKPGKAVKLLIYYTSILHSGVPSRFSGSGSGTDYTLTISSLQPEDFATYFCQQGDTLPWTFGQGTKLEIKRTVAAPSVFIFPPSDEQLKSGTASVVCLLNNFYPREAKVQWKVDNALQSGNSQESVTEQDSKDSTYSLSSTLTLSKADYEKHKVYACEVTHQGLSSPVTKSFNRGEC

SEQ ID NO: 1462 - protein, 5 aa, Artificial Sequence
  source: /note="Description of Artificial Sequence: Synthetic peptide"
SYDMH

SEQ ID NO: 1463 - protein, 17 aa, Artificial Sequence
  source: /note="Description of Artificial Sequence: Synthetic peptide"
RIDPQSGGIKYAQKFQG

SEQ ID NO: 1464 - protein, 9 aa, Artificial Sequence
  source: /note="Description of Artificial Sequence: Synthetic peptide"
WDYGGYFDV

SEQ ID NO: 1465 - protein, 118 aa, Artificial Sequence; identical to SEQ ID NO: 922
  source: /note="Description of Artificial Sequence: Synthetic polypeptide"

SEQ ID NO: 1466 - protein, 226 aa, Artificial Sequence; identical to SEQ ID NO: 1316
  source: /note="Description of Artificial Sequence: Synthetic polypeptide"

SEQ ID NO: 1467 - protein, 11 aa, Artificial Sequence
  source: /note="Description of Artificial Sequence: Synthetic peptide"
RASQDIYNYLN

SEQ ID NO: 1468 - protein, 7 aa, Artificial Sequence
  source: /note="Description of Artificial Sequence: Synthetic peptide"
YTSRLHS

SEQ ID NO: 1469 - protein, 9 aa, Artificial Sequence
  source: /note="Description of Artificial Sequence: Synthetic peptide"
QQGDTLPWT

SEQ ID NO: 1470 - protein, 107 aa, Artificial Sequence; identical to SEQ ID NO: 163
  source: /note="Description of Artificial Sequence: Synthetic polypeptide"

SEQ ID NO: 1471 - protein, 214 aa, Artificial Sequence; identical to SEQ ID NO: 164
  source: /note="Description of Artificial Sequence: Synthetic polypeptide"

SEQ ID NO: 1472 - protein, 5 aa, Artificial Sequence
  source: /note="Description of Artificial Sequence: Synthetic peptide"
YYDLH

SEQ ID NO: 1473 - protein, 17 aa, Artificial Sequence
  source: /note="Description of Artificial Sequence: Synthetic peptide"
RIDPQSGGIKYAQKFQG

SEQ ID NO: 1474 - protein, 9 aa, Artificial Sequence
  source: /note="Description of Artificial Sequence: Synthetic peptide"
WDYGGYFDV

SEQ ID NO: 1475 - protein, 118 aa, Artificial Sequence; identical to SEQ ID NO: 998
  source: /note="Description of Artificial Sequence: Synthetic polypeptide"

SEQ ID NO: 1476 - protein, 226 aa, Artificial Sequence
  source: /note="Description of Artificial Sequence: Synthetic polypeptide"
EVQLVQSGAEVKKPGASVKVSCKASGYTFTYYDLHWVRQAPGQGLEWMGRIDPQSGGIKYAQKFQGRATLTVDTSTSTAYMELSRLRSDDTAVYYCARWDYGGYFDVWGQGTLVTVSSASTKGPSVFPLAPSSKSTSGGTAALGCLVKDYFPEPVTVSWNSGALTSGVHTFPAVLQSSGLYSLSSVVTVPSSSLGTQTYICNVNHKPSNTKVDKKVEPKSCDKTHT

SEQ ID NO: 1477 - protein, 12 aa, Artificial Sequence
  source: /note="Description of Artificial Sequence: Synthetic peptide"
RASQDIYNYLNW

SEQ ID NO: 1478 - protein, 7 aa, Artificial Sequence
  source: /note="Description of Artificial Sequence: Synthetic peptide"
YTSRLHS

SEQ ID NO: 1479 - protein, 10 aa, Artificial Sequence
  source: /note="Description of Artificial Sequence: Synthetic peptide"
QQGDDIPWTF

SEQ ID NO: 1480 - protein, 107 aa, Artificial Sequence; identical to SEQ ID NO: 1034
  source: /note="Description of Artificial Sequence: Synthetic polypeptide"

SEQ ID NO: 1481 - protein, 214 aa, Artificial Sequence
  source: /note="Description of Artificial Sequence: Synthetic polypeptide"
DIQMTQSPSSLSASVGDRVTITCRASQDIYNYLNWYQQKPGKAVKLLIYYTSRLHSGVPSRFSGSGSGTDYTLTISSLQPEDFATYFCQQGDDIPWTFGQGTKLEIKRTVAAPSVFIFPPSDEQLKSGTASVVCLLNNFYPREAKVQWKVDNALQSGNSQESVTEQDSKDSTYSLSSTLTLSKADYEKHKVYACEVTHQGLSSPVTKSFNRGEC

SEQ ID NO: 1482 - protein, 5 aa, Artificial Sequence
  source: /note="Description of Artificial Sequence: Synthetic peptide"
KYDMH

SEQ ID NO: 1483 - protein, 17 aa, Artificial Sequence
  source: /note="Description of Artificial Sequence: Synthetic peptide"
RIDPQDGGFKYAQKFQG

SEQ ID NO: 1484 - protein, 9 aa, Artificial Sequence
  source: /note="Description of Artificial Sequence: Synthetic peptide"
WDYGGYFDV

SEQ ID NO: 1485 - protein, 118 aa, Artificial Sequence; identical to SEQ ID NO: 940
  source: /note="Description of Artificial Sequence: Synthetic polypeptide"

SEQ ID NO: 1486 - protein, 226 aa, Artificial Sequence
  source: /note="Description of Artificial Sequence: Synthetic polypeptide"
EVQLVQSGAEVKKPGASVKVSCKASGYTFTKYDMHWVRQAPGQGLEWMGRIDPQDGGFKYAQKFQGRATLTVDTSTSTAYMELSRLRSDDTAVYYCARWDYGGYFDVWGQGTLVTVSSASTKGPSVFPLAPSSKSTSGGTAALGCLVKDYFPEPVTVSWNSGALTSGVHTFPAVLQSSGLYSLSSVVTVPSSSLGTQTYICNVNHKPSNTKVDKKVEPKSCDKTHT

SEQ ID NO: 1487 - protein, 11 aa, Artificial Sequence
  source: /note="Description of Artificial Sequence: Synthetic peptide"
RASQDIFNYLN

SEQ ID NO: 1488 - protein, 7 aa, Artificial Sequence
  source: /note="Description of Artificial Sequence: Synthetic peptide"
YTSYLHS

SEQ ID NO: 1489 - protein, 9 aa, Artificial Sequence
  source: /note="Description of Artificial Sequence: Synthetic peptide"
QQGDELPWT

SEQ ID NO: 1490 - protein, 107 aa, Artificial Sequence; identical to SEQ ID NO: 959
  source: /note="Description of Artificial Sequence: Synthetic polypeptide"

SEQ ID NO: 1491 - protein, 214 aa, Artificial Sequence
  source: /note="Description of Artificial Sequence: Synthetic polypeptide"
DIQMTQSPSSLSASVGDRVTITCRASQDIFNYLNWYQQKPGKAVKLLIYYTSYLHSGVPSRFSGSGSGTDYTLTISSLQPEDFATYFCQQGDELPWTFGQGTKLEIKRTVAAPSVFIFPPSDEQLKSGTASVVCLLNNFYPREAKVQWKVDNALQSGNSQESVTEQDSKDSTYSLSSTLTLSKADYEKHKVYACEVTHQGLSSPVTKSFNRGEC

SEQ ID NO: 1492 - protein, 5 aa, Artificial Sequence
  source: /note="Description of Artificial Sequence: Synthetic peptide"
YYDMH

SEQ ID NO: 1493 - protein, 17 aa, Artificial Sequence
  source: /note="Description of Artificial Sequence: Synthetic peptide"
RIDPYDGDIKYAQKFQG

SEQ ID NO: 1494 - protein, 9 aa, Artificial Sequence
  source: /note="Description of Artificial Sequence: Synthetic peptide"
WDYGGYFDV

SEQ ID NO: 1495 - protein, 118 aa, Artificial Sequence; identical to SEQ ID NO: 928
  source: /note="Description of Artificial Sequence: Synthetic polypeptide"

SEQ ID NO: 1496 - protein, 226 aa, Artificial Sequence
  source: /note="Description of Artificial Sequence: Synthetic polypeptide"
EVQLVQSGAEVKKPGASVKVSCKASGYTFTYYDMHWVRQAPGQGLEWMGRIDPYDGDIKYAQKFQGRATLTVDTSTSTAYMELSRLRSDDTAVYYCARWDYGGYFDVWGQGTLVTVSSASTKGPSVFPLAPSSKSTSGGTAALGCLVKDYFPEPVTVSWNSGALTSGVHTFPAVLQSSGLYSLSSVVTVPSSSLGTQTYICNVNHKPSNTKVDKKVEPKSCDKTHT

SEQ ID NO: 1497 - protein, 11 aa, Artificial Sequence
  source: /note="Description of Artificial Sequence: Synthetic peptide"
RASQDIYNYLN

SEQ ID NO: 1498 - protein, 7 aa, Artificial Sequence
  source: /note="Description of Artificial Sequence: Synthetic peptide"
YTSLLHS

SEQ ID NO: 1499 - protein, 9 aa, Artificial Sequence
  source: /note="Description of Artificial Sequence: Synthetic peptide"
QQGDELPWT

SEQ ID NO: 1500 - protein, 107 aa, Artificial Sequence; identical to SEQ ID NO: 964
  source: /note="Description of Artificial Sequence: Synthetic polypeptide"

SEQ ID NO: 1501 - protein, 214 aa, Artificial Sequence
  source: /note="Description of Artificial Sequence: Synthetic polypeptide"
DIQMTQSPSSLSASVGDRVTITCRASQDIYNYLNWYQQKPGKAVKLLIYYTSLLHSGVPSRFSGSGSGTDYTLTISSLQPEDFATYFCQQGDELPWTFGQGTKLEIKRTVAAPSVFIFPPSDEQLKSGTASVVCLLNNFYPREAKVQWKVDNALQSGNSQESVTEQDSKDSTYSLSSTLTLSKADYEKHKVYACEVTHQGLSSPVTKSFNRGEC

SEQ ID NO: 1502 - protein, 5 aa, Artificial Sequence
  source: /note="Description of Artificial Sequence: Synthetic peptide"
SYDMH

SEQ ID NO: 1503 - protein, 17 aa, Artificial Sequence
  source: /note="Description of Artificial Sequence: Synthetic peptide"
RIDPQSGGVKYAQKFQG

SEQ ID NO: 1504 - protein, 9 aa, Artificial Sequence
  source: /note="Description of Artificial Sequence: Synthetic peptide"
WDYGGYFDV

SEQ ID NO: 1505 - protein, 118 aa, Artificial Sequence; identical to SEQ ID NO: 614
  source: /note="Description of Artificial Sequence: Synthetic polypeptide"

SEQ ID NO: 1506 - protein, 226 aa, Artificial Sequence
  source: /note="Description of Artificial Sequence: Synthetic polypeptide"
EVQLVQSGAEVKKPGASVKVSCKASGYTFTSYDMHWVRQAPGQGLEWMGRIDPQSGGVKYAQKFQGRATLTVDTSTSTAYMELSRLRSDDTAVYYCARWDYGGYFDVWGQGTLVTVSSASTKGPSVFPLAPSSKSTSGGTAALGCLVKDYFPEPVTVSWNSGALTSGVHTFPAVLQSSGLYSLSSVVTVPSSSLGTQTYICNVNHKPSNTKVDKKVEPKSCDKTHT

SEQ ID NO: 1507 - protein, 11 aa, Artificial Sequence
  source: /note="Description of Artificial Sequence: Synthetic peptide"
RASQDIYNYLN

SEQ ID NO: 1508 - protein, 7 aa, Artificial Sequence
  source: /note="Description of Artificial Sequence: Synthetic peptide"
YTSVLHS

SEQ ID NO: 1509 - protein, 10 aa, Artificial Sequence
  source: /note="Description of Artificial Sequence: Synthetic peptide"
QQGDELPWTF

SEQ ID NO: 1510 - protein, 107 aa, Artificial Sequence; identical to SEQ ID NO: 954
  source: /note="Description of Artificial Sequence: Synthetic polypeptide"

SEQ ID NO: 1511 - protein, 214 aa, Artificial Sequence
  source: /note="Description of Artificial Sequence: Synthetic polypeptide"
DIQMTQSPSSLSASVGDRVTITCRASQDIYNYLNWYQQKPGKAVKLLIYYTSVLHSGVPSRFSGSGSGTDYTLTISSLQPEDFATYFCQQGDELPWTFGQGTKLEIKRTVAAPSVFIFPPSDEQLKSGTASVVCLLNNFYPREAKVQWKVDNALQSGNSQESVTEQDSKDSTYSLSSTLTLSKADYEKHKVYACEVTHQGLSSPVTKSFNRGEC

SEQ ID NO: 1512 - protein, 5 aa, Artificial Sequence
  source: /note="Description of Artificial Sequence: Synthetic peptide"
SYDMH

SEQ ID NO: 1513 - protein, 17 aa, Artificial Sequence
  source: /note="Description of Artificial Sequence: Synthetic peptide"
RIDPQSGGIRYAQKFQG

SEQ ID NO: 1514 - protein, 9 aa, Artificial Sequence
  source: /note="Description of Artificial Sequence: Synthetic peptide"
WDYGGYFDV

SEQ ID NO: 1515 - protein, 118 aa, Artificial Sequence; identical to SEQ ID NO: 935
  source: /note="Description of Artificial Sequence: Synthetic polypeptide"

SEQ ID NO: 1516 - protein, 226 aa, Artificial Sequence
  source: /note="Description of Artificial Sequence: Synthetic polypeptide"
EVQLVQSGAEVKKPGASVKVSCKASGYTFTSYDMHWVRQAPGQGLEWMGRIDPQSGGIRYAQKFQGRATLTVDTSTSTAYMELSRLRSDDTAVYYCARWDYGGYFDVWGQGTLVTVSSASTKGPSVFPLAPSSKSTSGGTAALGCLVKDYFPEPVTVSWNSGALTSGVHTFPAVLQSSGLYSLSSVVTVPSSSLGTQTYICNVNHKPSNTKVDKKVEPKSCDKTHT

SEQ ID NO: 1517 - protein, 11 aa, Artificial Sequence
  source: /note="Description of Artificial Sequence: Synthetic peptide"
RASQDIYNYLN

SEQ ID NO: 1518 - protein, 7 aa, Artificial Sequence
  source: /note="Description of Artificial Sequence: Synthetic peptide"
YTSNLHS

SEQ ID NO: 1519 - protein, 9 aa, Artificial Sequence
  source: /note="Description of Artificial Sequence: Synthetic peptide"
QQGDELPWT

SEQ ID NO: 1520 - protein, 107 aa, Artificial Sequence; identical to SEQ ID NO: 957
  source: /note="Description of Artificial Sequence: Synthetic polypeptide"

SEQ ID NO: 1521 - protein, 214 aa, Artificial Sequence
  source: /note="Description of Artificial Sequence: Synthetic polypeptide"
DIQMTQSPSSLSASVGDRVTITCRASQDIYNYLNWYQQKPGKAVKLLIYYTSNLHSGVPSRFSGSGSGTDYTLTISSLQPEDFATYFCQQGDELPWTFGQGTKLEIKRTVAAPSVFIFPPSDEQLKSGTASVVCLLNNFYPREAKVQWKVDNALQSGNSQESVTEQDSKDSTYSLSSTLTLSKADYEKHKVYACEVTHQGLSSPVTKSFNRGEC

SEQ ID NO: 1522 - protein, 5 aa, Artificial Sequence
  source: /note="Description of Artificial Sequence: Synthetic peptide"
SYDMH

SEQ ID NO: 1523 - protein, 17 aa, Artificial Sequence
  source: /note="Description of Artificial Sequence: Synthetic peptide"
RIDPQDGDVKYAQKFQG

SEQ ID NO: 1524 - protein, 9 aa, Artificial Sequence
  source: /note="Description of Artificial Sequence: Synthetic peptide"
WDYGGYFDV

SEQ ID NO: 1525 - protein, 118 aa, Artificial Sequence; identical to SEQ ID NO: 978
  source: /note="Description of Artificial Sequence: Synthetic polypeptide"

SEQ ID NO: 1526 - protein, 226 aa, Artificial Sequence
  source: /note="Description of Artificial Sequence: Synthetic polypeptide"
EVQLVQSGAEVKKPGASVKVSCKASGYTFTSYDMHWVRQAPGQGLEWMGRIDPQDGDVKYAQKFQGRATLTVDTSTSTAYMELSRLRSDDTAVYYCARWDYGGYFDVWGQGTLVTVSSASTKGPSVFPLAPSSKSTSGGTAALGCLVKDYFPEPVTVSWNSGALTSGVHTFPAVLQSSGLYSLSSVVTVPSSSLGTQTYICNVNHKPSNTKVDKKVEPKSCDKTHT

SEQ ID NO: 1527 - protein, 11 aa, Artificial Sequence
  source: /note="Description of Artificial Sequence: Synthetic peptide"
RASQDIYNYLN

SEQ ID NO: 1528 - protein, 7 aa, Artificial Sequence
  source: /note="Description of Artificial Sequence: Synthetic peptide"
YTSGLHS

SEQ ID NO: 1529 - protein, 9 aa, Artificial Sequence
  source: /note="Description of Artificial Sequence: Synthetic peptide"
QQGDELPWT

SEQ ID NO: 1530 - protein, 107 aa, Artificial Sequence; identical to SEQ ID NO: 1018
  source: /note="Description of Artificial Sequence: Synthetic polypeptide"

SEQ ID NO: 1531 - protein, 214 aa, Artificial Sequence
  source: /note="Description of Artificial Sequence: Synthetic polypeptide"
DIQMTQSPSSLSASVGDRVTITCRASQDIYNYLNWYQQKPGKAVKLLIYYTSGLHSGVPSRFSGSGSGTDYTLTISSLQPEDFATYFCQQGDELPWTFGQGTKLEIKRTVAAPSVFIFPPSDEQLKSGTASVVCLLNNFYPREAKVQWKVDNALQSGNSQESVTEQDSKDSTYSLSSTLTLSKADYEKHKVYACEVTHQGLSSPVTKSFNRGEC

SEQ ID NO: 1532 - protein, 5 aa, Artificial Sequence
  source: /note="Description of Artificial Sequence: Synthetic peptide"
SYDMH

SEQ ID NO: 1533 - protein, 17 aa, Artificial Sequence
  source: /note="Description of Artificial Sequence: Synthetic peptide"
RIDPQSGGIRYAQKFQG

SEQ ID NO: 1534 - protein, 9 aa, Artificial Sequence
  source: /note="Description of Artificial Sequence: Synthetic peptide"
WDYGGQFDV

SEQ ID NO: 1535 - protein, 118 aa, Artificial Sequence; identical to SEQ ID NO: 1177
  source: /note="Description of Artificial Sequence: Synthetic polypeptide"

SEQ ID NO: 1536 - protein, 226 aa, Artificial Sequence
  source: /note="Description of Artificial Sequence: Synthetic polypeptide"
EVQLVQSGAEVKKPGASVKVSCKASGYTFTSYDMHWVRQAPGQGLEWMGRIDPQSGGIRYAQKFQGRATLTVDTSTSTAYMELSRLRSDDTAVYYCARWDYGGQFDVWGQGTLVTVSSASTKGPSVFPLAPSSKSTSGGTAALGCLVKDYFPEPVTVSWNSGALTSGVHTFPAVLQSSGLYSLSSVVTVPSSSLGTQTYICNVNHKPSNTKVDKKVEPKSCDKTHT

SEQ ID NO: 1537 - protein, 11 aa, Artificial Sequence
  source: /note="Description of Artificial Sequence: Synthetic peptide"
RASQDIYNYLN

SEQ ID NO: 1538 - protein, 7 aa, Artificial Sequence
  source: /note="Description of Artificial Sequence: Synthetic peptide"
YTSILHS

SEQ ID NO: 1539 - protein, 9 aa, Artificial Sequence
  source: /note="Description of Artificial Sequence: Synthetic peptide"
QQGDTLPWT

SEQ ID NO: 1540 - protein, 107 aa, Artificial Sequence; identical to SEQ ID NO: 1026
  source: /note="Description of Artificial Sequence: Synthetic polypeptide"

SEQ ID NO: 1541 - protein, 214 aa, Artificial Sequence; identical to SEQ ID NO: 1461
  source: /note="Description of Artificial Sequence: Synthetic polypeptide"

SEQ ID NO: 1542 - protein, 5 aa, Artificial Sequence
  source: /note="Description of Artificial Sequence: Synthetic peptide"
EYDMH

SEQ ID NO: 1543 - protein, 17 aa, Artificial Sequence
  source: /note="Description of Artificial Sequence: Synthetic peptide"
RIDPQSGGIRYAQKFQG

SEQ ID NO: 1544 - protein, 9 aa, Artificial Sequence
  source: /note="Description of Artificial Sequence: Synthetic peptide"
WDYGGQFDA

SEQ ID NO: 1545 - protein, 118 aa, Artificial Sequence; identical to SEQ ID NO: 1169
  source: /note="Description of Artificial Sequence: Synthetic polypeptide"

SEQ ID NO: 1546 - protein, 226 aa, Artificial Sequence
  source: /note="Description of Artificial Sequence: Synthetic polypeptide"
EVQLVQSGAEVKKPGASVKVSCKASGYTFTEYDMHWVRQAPGQGLEWMGRIDPQSGGIRYAQKFQGRATLTVDTSTSTAYMELSRLRSDDTAVYYCARWDYGGQFDAWGQGTLVTVSSASTKGPSVFPLAPSSKSTSGGTAALGCLVKDYFPEPVTVSWNSGALTSGVHTFPAVLQSSGLYSLSSVVTVPSSSLGTQTYICNVNHKPSNTKVDKKVEPKSCDKTHT

SEQ ID NO: 1547 - protein, 11 aa, Artificial Sequence
  source: /note="Description of Artificial Sequence: Synthetic peptide"
RASQDIYNYLN

SEQ ID NO: 1548 - protein, 7 aa, Artificial Sequence
  source: /note="Description of Artificial Sequence: Synthetic peptide"
YTSVLHS

SEQ ID NO: 1549 - protein, 9 aa, Artificial Sequence
  source: /note="Description of Artificial Sequence: Synthetic peptide"
QQGDTLPWT

SEQ ID NO: 1550 - protein, 107 aa, Artificial Sequence; identical to SEQ ID NO: 955
  source: /note="Description of Artificial Sequence: Synthetic polypeptide"

SEQ ID NO: 1551 - protein, 214 aa, Artificial Sequence; identical to SEQ ID NO: 1421
  source: /note="Description of Artificial Sequence: Synthetic polypeptide"

SEQ ID NO: 1552 - protein, 5 aa, Artificial Sequence
  source: /note="Description of Artificial Sequence: Synthetic peptide"
SYYMN

SEQ ID NO: 1553 - protein, 17 aa, Artificial Sequence
  source: /note="Description of Artificial Sequence: Synthetic peptide"
RIDPQSGGVKYAQKFQG

SEQ ID NO: 1554 - protein, 9 aa, Artificial Sequence
  source: /note="Description of Artificial Sequence: Synthetic peptide"
WHYGGQFDV

SEQ ID NO: 1555 - protein, 118 aa, Artificial Sequence; identical to SEQ ID NO: 1156
  source: /note="Description of Artificial Sequence: Synthetic polypeptide"

SEQ ID NO: 1556 - protein, 226 aa, Artificial Sequence
  source: /note="Description of Artificial Sequence: Synthetic polypeptide"
EVQLVQSGAEVKKPGASVKVSCKASGYTFTSYYMNWVRQAPGQGLEWMGRIDPQSGGVKYAQKFQGRATLTVDTSTSTAYMELSRLRSDDTAVYYCARWHYGGQFDVWGQGTLVTVSSASTKGPSVFPLAPSSKSTSGGTAALGCLVKDYFPEPVTVSWNSGALTSGVHTFPAVLQSSGLYSLSSVVTVPSSSLGTQTYICNVNHKPSNTKVDKKVEPKSCDKTHT

SEQ ID NO: 1557 - protein, 11 aa, Artificial Sequence
  source: /note="Description of Artificial Sequence: Synthetic peptide"
RASQDIYNYLN

SEQ ID NO: 1558 - protein, 7 aa, Artificial Sequence
  source: /note="Description of Artificial Sequence: Synthetic peptide"
YTSGLHS

SEQ ID NO: 1559 - protein, 9 aa, Artificial Sequence
  source: /note="Description of Artificial Sequence: Synthetic peptide"
QQGDTLPWT

SEQ ID NO: 1560 - protein, 107 aa, Artificial Sequence; identical to SEQ ID NO: 1011
  source: /note="Description of Artificial Sequence: Synthetic polypeptide"

SEQ ID NO: 1561 - protein, 214 aa, Artificial Sequence; identical to SEQ ID NO: 1451
  source: /note="Description of Artificial Sequence: Synthetic polypeptide"

SEQ ID NO: 1562 - protein, 361 aa, Homo sapiens
LSTCKTIDMELVKRKRIEAIRGQILSKLRLASPPSQGEVPPGPLPEAVLALYNSTRDRVAGESAEPEPEPEADYYAKEVTRVLMVETHNEIYDKFKQSTHSIYMFFNTSELREAVPEPVLLSRAELRLLRLKLKVEQHVELYQKYSNNSWRYLSNRLLAPSDSPEWLSFDVTGVVRQWLSRGGEIEGFRLSAHCSCDSRDNTLQVDINGFTTGRRGDLATIHGMNRPFLLLMATPLERAQHLQSSRHRRALDTNYCFSSTEKNCCVRQLYIDFRKDLGWKWIHEPKGYHANFCLGPCPYIWSLDTQYSKVLALYNQHNPGASAAPCCVPQALEPLPIVYYVGRKPKVEQLSNMIVRSCKCS

SEQ ID NO: 1563 - protein, 249 aa, Homo sapiens
LSTCKTIDMELVKRKRIEAIRGQILSKLRLASPPSQGEVPPGPLPEAVLALYNSTRDRVAGESAEPEPEPEADYYAKEVTRVLMVETHNEIYDKFKQSTHSIYMFFNTSELREAVPEPVLLSRAELRLLRLKLKVEQHVELYQKYSNNSWRYLSNRLLAPSDSPEWLSFDVTGVVRQWLSRGGEIEGFRLSAHCSCDSRDNTLQVDINGFTTGRRGDLATIHGMNRPFLLLMATPLERAQHLQSSRHRR

SEQ ID NO: 1564 - protein, 112 aa, Homo sapiens
ALDTNYCFSSTEKNCCVRQLYIDFRKDLGWKWIHEPKGYHANFCLGPCPYIWSLDTQYSKVLALYNQHNPGASAAPCCVPQALEPLPIVYYVGRKPKVEQLSNMIVRSCKCS

SEQ ID NO: 1565 - protein, 5 aa, Artificial Sequence
  source: /note="Description of Artificial Sequence: Synthetic peptide"
SYDIH

SEQ ID NO: 1566 - protein, 17 aa, Artificial Sequence
  source: /note="Description of Artificial Sequence: Synthetic peptide"
RIDPQSGGIKYAQKFQG

SEQ ID NO: 1567 - protein, 9 aa, Artificial Sequence
  source: /note="Description of Artificial Sequence: Synthetic peptide"
WDYGGYFDV

SEQ ID NO: 1568 - protein, 11 aa, Artificial Sequence
  source: /note="Description of Artificial Sequence: Synthetic peptide"
RASQDITNYLN

SEQ ID NO: 1569 - protein, 7 aa, Artificial Sequence
  source: /note="Description of Artificial Sequence: Synthetic peptide"
YTSRLHS

SEQ ID NO: 1570 - protein, 9 aa, Artificial Sequence
  source: /note="Description of Artificial Sequence: Synthetic peptide"
QQGDTLPWT

SEQ ID NO: 1571 - protein, 7 aa, Artificial Sequence
  source: /note="Description of Artificial Sequence: Synthetic peptide"
GYTFTSY

SEQ ID NO: 1572 - protein, 6 aa, Artificial Sequence
  source: /note="Description of Artificial Sequence: Synthetic peptide"
DPQSGG

SEQ ID NO: 1573 - protein, 9 aa, Artificial Sequence
  source: /note="Description of Artificial Sequence: Synthetic peptide"
WDYGGYFDV

SEQ ID NO: 1574 - protein, 11 aa, Artificial Sequence
  source: /note="Description of Artificial Sequence: Synthetic peptide"
RASQDITNYLN

SEQ ID NO: 1575 - protein, 7 aa, Artificial Sequence
  source: /note="Description of Artificial Sequence: Synthetic peptide"
YTSRLHS

SEQ ID NO: 1576 - protein, 9 aa, Artificial Sequence
  source: /note="Description of Artificial Sequence: Synthetic peptide"
QQGDTLPWT

SEQ ID NO: 1577 - protein, 10 aa, Artificial Sequence
  source: /note="Description of Artificial Sequence: Synthetic peptide"
GYTFTSYDIH

SEQ ID NO: 1578 - protein, 10 aa, Artificial Sequence
  source: /note="Description of Artificial Sequence: Synthetic peptide"
RIDPQSGGIK

SEQ ID NO: 1579 - protein, 9 aa, Artificial Sequence
  source: /note="Description of Artificial Sequence: Synthetic peptide"
WDYGGYFDV

SEQ ID NO: 1580 - protein, 11 aa, Artificial Sequence
  source: /note="Description of Artificial Sequence: Synthetic peptide"
RASQDITNYLN

SEQ ID NO: 1581 - protein, 7 aa, Artificial Sequence
  source: /note="Description of Artificial Sequence: Synthetic peptide"
YTSRLHS

SEQ ID NO: 1582 - protein, 9 aa, Artificial Sequence
  source: /note="Description of Artificial Sequence: Synthetic peptide"
QQGDTLPWT

SEQ ID NO: 1583 - protein, 8 aa, Artificial Sequence
  source: /note="Description of Artificial Sequence: Synthetic peptide"
GYTFTSYD

SEQ ID NO: 1584 - protein, 8 aa, Artificial Sequence
  source: /note="Description of Artificial Sequence: Synthetic peptide"
IDPQSGGI

SEQ ID NO: 1585 - protein, 11 aa, Artificial Sequence
  source: /note="Description of Artificial Sequence: Synthetic peptide"
ARWDYGGYFDV

SEQ ID NO: 1586 - protein, 6 aa, Artificial Sequence
  source: /note="Description of Artificial Sequence: Synthetic peptide"
QDITNY

SEQ ID NO: 1587 - protein, 3 aa, Artificial Sequence
  source: /note="Description of Artificial Sequence: Synthetic peptide"
YTS

SEQ ID NO: 1588 - protein, 9 aa, Artificial Sequence
  source: /note="Description of Artificial Sequence: Synthetic peptide"
QQGDTLPWT

SEQ ID NO: 1589 - protein, 5 aa, Artificial Sequence
  source: /note="Description of Artificial Sequence: Synthetic peptide"
SYDIH

SEQ ID NO: 1590 - protein, 17 aa, Artificial Sequence
  source: /note="Description of Artificial Sequence: Synthetic peptide"
RIDPYSGGIKYAQKFQG

SEQ ID NO: 1591 - protein, 9 aa, Artificial Sequence
  source: /note="Description of Artificial Sequence: Synthetic peptide"
WDYGGYFDV

SEQ ID NO: 1592 - protein, 11 aa, Artificial Sequence
  source: /note="Description of Artificial Sequence: Synthetic peptide"
RASQDITNYLN

SEQ ID NO: 1593 - protein, 7 aa, Artificial Sequence
  source: /note="Description of Artificial Sequence: Synthetic peptide"
YTSRLHS

SEQ ID NO: 1594 - protein, 9 aa, Artificial Sequence
  source: /note="Description of Artificial Sequence: Synthetic peptide"
QQGDTLPWT

SEQ ID NO: 1595 - protein, 7 aa, Artificial Sequence
  source: /note="Description of Artificial Sequence: Synthetic peptide"
GYTFTSY

SEQ ID NO: 1596 - protein, 6 aa, Artificial Sequence
  source: /note="Description of Artificial Sequence: Synthetic peptide"
DPYSGG

SEQ ID NO: 1597 - protein, 9 aa, Artificial Sequence
  source: /note="Description of Artificial Sequence: Synthetic peptide"
WDYGGYFDV

SEQ ID NO: 1598 - protein, 11 aa, Artificial Sequence
  source: /note="Description of Artificial Sequence: Synthetic peptide"
RASQDITNYLN

SEQ ID NO: 1599 - protein, 7 aa, Artificial Sequence
  source: /note="Description of Artificial Sequence: Synthetic peptide"
YTSRLHS

SEQ ID NO: 1600 - protein, 9 aa, Artificial Sequence
  source: /note="Description of Artificial Sequence: Synthetic peptide"
QQGDTLPWT

SEQ ID NO: 1601 - protein, 10 aa, Artificial Sequence
  source: /note="Description of Artificial Sequence: Synthetic peptide"
GYTFTSYDIH

SEQ ID NO: 1602 - protein, 10 aa, Artificial Sequence
  source: /note="Description of Artificial Sequence: Synthetic peptide"
RIDPYSGGIK

SEQ ID NO: 1603 - protein, 9 aa, Artificial Sequence
  source: /note="Description of Artificial Sequence: Synthetic peptide"
WDYGGYFDV

SEQ ID NO: 1604 - protein, 11 aa, Artificial Sequence
  source: /note="Description of Artificial Sequence: Synthetic peptide"
RASQDITNYLN

SEQ ID NO: 1605 - protein, 7 aa, Artificial Sequence
  source: /note="Description of Artificial Sequence: Synthetic peptide"
YTSRLHS

SEQ ID NO: 1606 - protein, 9 aa, Artificial Sequence
  source: /note="Description of Artificial Sequence: Synthetic peptide"
QQGDTLPWT

SEQ ID NO: 1607 - protein, 8 aa, Artificial Sequence
  source: /note="Description of Artificial Sequence: Synthetic peptide"
GYTFTSYD

SEQ ID NO: 1608 - protein, 8 aa, Artificial Sequence
  source: /note="Description of Artificial Sequence: Synthetic peptide"
IDPYSGGI

SEQ ID NO: 1609 - protein, 11 aa, Artificial Sequence
  source: /note="Description of Artificial Sequence: Synthetic peptide"
ARWDYGGYFDV

SEQ ID NO: 1610 - protein, 6 aa, Artificial Sequence
  source: /note="Description of Artificial Sequence: Synthetic peptide"
QDITNY

SEQ ID NO: 1611 - protein, 3 aa, Artificial Sequence
  source: /note="Description of Artificial Sequence: Synthetic peptide"
YTS

SEQ ID NO: 1612 - protein, 9 aa, Artificial Sequence
  source: /note="Description of Artificial Sequence: Synthetic peptide"
QQGDTLPWT

SEQ ID NO: 1613 - protein, 5 aa, Artificial Sequence
  source: /note="Description of Artificial Sequence: Synthetic peptide"
SYDMH

SEQ ID NO: 1614 - protein, 17 aa, Artificial Sequence
  source: /note="Description of Artificial Sequence: Synthetic peptide"
RIDPQSGGIKYAQKFQG

SEQ ID NO: 1615 - protein, 9 aa, Artificial Sequence
  source: /note="Description of Artificial Sequence: Synthetic peptide"
WDYGGYFDV

SEQ ID NO: 1616 - protein, 11 aa, Artificial Sequence
  source: /note="Description of Artificial Sequence: Synthetic peptide"
RASQDITNYLN

SEQ ID NO: 1617 - protein, 7 aa, Artificial Sequence
  source: /note="Description of Artificial Sequence: Synthetic peptide"
YTSRLHS

SEQ ID NO: 1618 - protein, 9 aa, Artificial Sequence
  source: /note="Description of Artificial Sequence: Synthetic peptide"
QQGDTLPWT

SEQ ID NO: 1619 - protein, 7 aa, Artificial Sequence
  source: /note="Description of Artificial Sequence: Synthetic peptide"
GYTFTSY

SEQ ID NO: 1620 - protein, 6 aa, Artificial Sequence
  source: /note="Description of Artificial Sequence: Synthetic peptide"
DPQSGG

SEQ ID NO: 1621 - protein, 9 aa, Artificial Sequence
  source: /note="Description of Artificial Sequence: Synthetic peptide"
WDYGGYFDV

SEQ ID NO: 1622 - protein, 11 aa, Artificial Sequence
  source: /note="Description of Artificial Sequence: Synthetic peptide"
RASQDITNYLN

SEQ ID NO: 1623 - protein, 7 aa, Artificial Sequence
  source: /note="Description of Artificial Sequence: Synthetic peptide"
YTSRLHS

SEQ ID NO: 1624 - protein, 9 aa, Artificial Sequence
  source: /note="Description of Artificial Sequence: Synthetic peptide"
QQGDTLPWT

SEQ ID NO: 1625 - protein, 10 aa, Artificial Sequence
  source: /note="Description of Artificial Sequence: Synthetic peptide"
GYTFTSYDMH

SEQ ID NO: 1626 - protein, 10 aa, Artificial Sequence
  source: /note="Description of Artificial Sequence: Synthetic peptide"
RIDPQSGGIK

SEQ ID NO: 1627 - protein, 9 aa, Artificial Sequence
  source: /note="Description of Artificial Sequence: Synthetic peptide"
WDYGGYFDV

SEQ ID NO: 1628 - protein, 11 aa, Artificial Sequence
  source: /note="Description of Artificial Sequence: Synthetic peptide"
RASQDITNYLN

SEQ ID NO: 1629 - protein, 7 aa, Artificial Sequence
  source: /note="Description of Artificial Sequence: Synthetic peptide"
YTSRLHS

SEQ ID NO: 1630 - protein, 9 aa, Artificial Sequence
  source: /note="Description of Artificial Sequence: Synthetic peptide"
QQGDTLPWT

SEQ ID NO: 1631 - protein, 8 aa, Artificial Sequence
  source: /note="Description of Artificial Sequence: Synthetic peptide"
GYTFTSYD

SEQ ID NO: 1632 - protein, 8 aa, Artificial Sequence
  source: /note="Description of Artificial Sequence: Synthetic peptide"
IDPQSGGI

SEQ ID NO: 1633 - protein, 11 aa, Artificial Sequence
  source: /note="Description of Artificial Sequence: Synthetic peptide"
ARWDYGGYFDV

SEQ ID NO: 1634 - protein, 6 aa, Artificial Sequence
  source: /note="Description of Artificial Sequence: Synthetic peptide"
QDITNY

SEQ ID NO: 1635 - protein, 3 aa, Artificial Sequence
  source: /note="Description of Artificial Sequence: Synthetic peptide"
YTS

SEQ ID NO: 1636 - protein, 9 aa, Artificial Sequence
  source: /note="Description of Artificial Sequence: Synthetic peptide"
QQGDTLPWT

SEQ ID NO: 1637 - protein, 5 aa, Artificial Sequence
  source: /note="Description of Artificial Sequence: Synthetic peptide"
SYDMH

SEQ ID NO: 1638 - protein, 17 aa, Artificial Sequence
  source: /note="Description of Artificial Sequence: Synthetic peptide"
RIDPQSGGIKYAQKFQG

SEQ ID NO: 1639 - protein, 9 aa, Artificial Sequence
  source: /note="Description of Artificial Sequence: Synthetic peptide"
YDHGGYFDV

SEQ ID NO: 1640 - protein, 11 aa, Artificial Sequence
  source: /note="Description of Artificial Sequence: Synthetic peptide"
RASQDIYNYLN

SEQ ID NO: 1641 - protein, 7 aa, Artificial Sequence
  source: /note="Description of Artificial Sequence: Synthetic peptide"
YTSRLHS

SEQ ID NO: 1642 - protein, 9 aa, Artificial Sequence
  source: /note="Description of Artificial Sequence: Synthetic peptide"
QQGDTLPWT

SEQ ID NO: 1643 - protein, 7 aa, Artificial Sequence
  source: /note="Description of Artificial Sequence: Synthetic peptide"
GYTFTSY

SEQ ID NO: 1644 - protein, 6 aa, Artificial Sequence
  source: /note="Description of Artificial Sequence: Synthetic peptide"
DPQSGG

SEQ ID NO: 1645 - protein, 9 aa, Artificial Sequence
  source: /note="Description of Artificial Sequence: Synthetic peptide"
YDHGGYFDV

SEQ ID NO: 1646 - protein, 11 aa, Artificial Sequence
  source: /note="Description of Artificial Sequence: Synthetic peptide"
RASQDIYNYLN

SEQ ID NO: 1647 - protein, 7 aa, Artificial Sequence
  source: /note="Description of Artificial Sequence: Synthetic peptide"
YTSRLHS

SEQ ID NO: 1648 - protein, 9 aa, Artificial Sequence
  source: /note="Description of Artificial Sequence: Synthetic peptide"
QQGDTLPWT

SEQ ID NO: 1649 - protein, 10 aa, Artificial Sequence
  source: /note="Description of Artificial Sequence: Synthetic peptide"
GYTFTSYDMH

SEQ ID NO: 1650 - protein, 10 aa, Artificial Sequence
  source: /note="Description of Artificial Sequence: Synthetic peptide"
RIDPQSGGIK

SEQ ID NO: 1651 - protein, 9 aa, Artificial Sequence
  source: /note="Description of Artificial Sequence: Synthetic peptide"
YDHGGYFDV

SEQ ID NO: 1652 - protein, 11 aa, Artificial Sequence
  source: /note="Description of Artificial Sequence: Synthetic peptide"
RASQDIYNYLN

SEQ ID NO: 1653 - protein, 7 aa, Artificial Sequence
  source: /note="Description of Artificial Sequence: Synthetic peptide"
YTSRLHS

SEQ ID NO: 1654 - protein, 9 aa, Artificial Sequence
  source: /note="Description of Artificial Sequence: Synthetic peptide"
QQGDTLPWT

SEQ ID NO: 1655 - protein, 8 aa, Artificial Sequence
  source: /note="Description of Artificial Sequence: Synthetic peptide"
GYTFTSYD

SEQ ID NO: 1656 - protein, 8 aa, Artificial Sequence
  source: /note="Description of Artificial Sequence: Synthetic peptide"
IDPQSGGI

SEQ ID NO: 1657 - protein, 11 aa, Artificial Sequence
  source: /note="Description of Artificial Sequence: Synthetic peptide"
ARYDHGGYFDV

SEQ ID NO: 1658 - protein, 6 aa, Artificial Sequence
  source: /note="Description of Artificial Sequence: Synthetic peptide"
QDIYNY

SEQ ID NO: 1659 - protein, 3 aa, Artificial Sequence
  source: /note="Description of Artificial Sequence: Synthetic peptide"
YTS

SEQ ID NO: 1660 - protein, 9 aa, Artificial Sequence
  source: /note="Description of Artificial Sequence: Synthetic peptide"
QQGDTLPWT

SEQ ID NO: 1661 - protein, 5 aa, Artificial Sequence
  source: /note="Description of Artificial Sequence: Synthetic peptide"
SYQVH

SEQ ID NO: 1662 - protein, 17 aa, Artificial Sequence
  source: /note="Description of Artificial Sequence: Synthetic peptide"
RIDPQSGGIKYAQKFQG

SEQ ID NO: 1663 - protein, 8 aa, Artificial Sequence
  source: /note="Description of Artificial Sequence: Synthetic peptide"
DYGGYFDV

SEQ ID NO: 1664 - protein, 11 aa, Artificial Sequence
  source: /note="Description of Artificial Sequence: Synthetic peptide"
RASQDIYNYLN

SEQ ID NO: 1665 - protein, 7 aa, Artificial Sequence
  source: /note="Description of Artificial Sequence: Synthetic peptide"
YTSRLHS

SEQ ID NO: 1666 - protein, 9 aa, Artificial Sequence
  source: /note="Description of Artificial Sequence: Synthetic peptide"
QQGDTLPWT

SEQ ID NO: 1667 - protein, 7 aa, Artificial Sequence
  source: /note="Description of Artificial Sequence: Synthetic peptide"
GYTFTSY

SEQ ID NO: 1668 - protein, 6 aa, Artificial Sequence
  source: /note="Description of Artificial Sequence: Synthetic peptide"
DPQSGG

SEQ ID NO: 1669 - protein, 8 aa, Artificial Sequence
  source: /note="Description of Artificial Sequence: Synthetic peptide"
DYGGYFDV

SEQ ID NO: 1670 - protein, 11 aa, Artificial Sequence
  source: /note="Description of Artificial Sequence: Synthetic peptide"
RASQDIYNYLN

SEQ ID NO: 1671 - protein, 7 aa, Artificial Sequence
  source: /note="Description of Artificial Sequence: Synthetic peptide"
YTSRLHS

SEQ ID NO: 1672 - protein, 9 aa, Artificial Sequence
  source: /note="Description of Artificial Sequence: Synthetic peptide"
QQGDTLPWT

SEQ ID NO: 1673 - protein, 10 aa, Artificial Sequence
  source: /note="Description of Artificial Sequence: Synthetic peptide"
GYTFTSYQVH

SEQ ID NO: 1674 - protein, 10 aa, Artificial Sequence
  source: /note="Description of Artificial Sequence: Synthetic peptide"
RIDPQSGGIK

SEQ ID NO: 1675 - protein, 8 aa, Artificial Sequence
  source: /note="Description of Artificial Sequence: Synthetic peptide"
DYGGYFDV

SEQ ID NO: 1676 - protein, 11 aa, Artificial Sequence
  source: /note="Description of Artificial Sequence: Synthetic peptide"
RASQDIYNYLN

SEQ ID NO: 1677 - protein, 7 aa, Artificial Sequence
  source: /note="Description of Artificial Sequence: Synthetic peptide"
YTSRLHS

SEQ ID NO: 1678 - protein, 9 aa, Artificial Sequence
  source: /note="Description of Artificial Sequence: Synthetic peptide"
QQGDTLPWT

SEQ ID NO: 1679 - protein, 8 aa, Artificial Sequence
  source: /note="Description of Artificial Sequence: Synthetic peptide"
GYTFTSYQ

SEQ ID NO: 1680 - protein, 8 aa, Artificial Sequence
  source: /note="Description of Artificial Sequence: Synthetic peptide"
IDPQSGGI

SEQ ID NO: 1681 - protein, 10 aa, Artificial Sequence
  source: /note="Description of Artificial Sequence: Synthetic peptide"
ARDYGGYFDV

SEQ ID NO: 1682 - protein, 6 aa, Artificial Sequence
  source: /note="Description of Artificial Sequence: Synthetic peptide"
QDIYNY

SEQ ID NO: 1683 - protein, 3 aa, Artificial Sequence
  source: /note="Description of Artificial Sequence: Synthetic peptide"
YTS

SEQ ID NO: 1684 - protein, 9 aa, Artificial Sequence
  source: /note="Description of Artificial Sequence: Synthetic peptide"
QQGDTLPWT

SEQ ID NO: 1685 - protein, 5 aa, Artificial Sequence
  source: /note="Description of Artificial Sequence: Synthetic peptide"
SYDMH

SEQ ID NO: 1686 - protein, 17 aa, Artificial Sequence
  source: /note="Description of Artificial Sequence: Synthetic peptide"
RIDPQSGGEKYAQKFQG

SEQ ID NO: 1687 - protein, 9 aa, Artificial Sequence
  source: /note="Description of Artificial Sequence: Synthetic peptide"
YDYGGYFDV

SEQ ID NO: 1688 - protein, 11 aa, Artificial Sequence
  source: /note="Description of Artificial Sequence: Synthetic peptide"
RASQDIYNYLN

SEQ ID NO: 1689 - protein, 7 aa, Artificial Sequence
  source: /note="Description of Artificial Sequence: Synthetic peptide"
YTSRLHS

SEQ ID NO: 1690 - protein, 9 aa, Artificial Sequence
  source: /note="Description of Artificial Sequence: Synthetic peptide"
QQGDTLPWT

SEQ ID NO: 1691 - protein, 7 aa, Artificial Sequence
  source: /note="Description of Artificial Sequence: Synthetic peptide"
GYTFTSY

SEQ ID NO: 1692 - protein, 6 aa, Artificial Sequence
  source: /note="Description of Artificial Sequence: Synthetic peptide"
DPQSGG

SEQ ID NO: 1693 - protein, 9 aa, Artificial Sequence
  source: /note="Description of Artificial Sequence: Synthetic peptide"
YDYGGYFDV

SEQ ID NO: 1694 - protein, 11 aa, Artificial Sequence
  source: /note="Description of Artificial Sequence: Synthetic peptide"
RASQDIYNYLN

SEQ ID NO: 1695 - protein, 7 aa, Artificial Sequence
  source: /note="Description of Artificial Sequence: Synthetic peptide"
YTSRLHS

SEQ ID NO: 1696 - protein, 9 aa, Artificial Sequence
  source: /note="Description of Artificial Sequence: Synthetic peptide"
QQGDTLPWT

SEQ ID NO: 1697 - protein, 10 aa, Artificial Sequence
  source: /note="Description of Artificial Sequence: Synthetic peptide"
GYTFTSYDMH

SEQ ID NO: 1698 - protein, 10 aa, Artificial Sequence
  source: /note="Description of Artificial Sequence: Synthetic peptide"
RIDPQSGGEK

SEQ ID NO: 1699 - protein, 9 aa, Artificial Sequence
  source: /note="Description of Artificial Sequence: Synthetic peptide"
YDYGGYFDV

SEQ ID NO: 1700 - protein, 11 aa, Artificial Sequence
  source: /note="Description of Artificial Sequence: Synthetic peptide"
RASQDIYNYLN

SEQ ID NO: 1701 - protein, 7 aa, Artificial Sequence
  source: /note="Description of Artificial Sequence: Synthetic peptide"
YTSRLHS

SEQ ID NO: 1702 - protein, 9 aa, Artificial Sequence
  source: /note="Description of Artificial Sequence: Synthetic peptide"
QQGDTLPWT

SEQ ID NO: 1703 - protein, 8 aa, Artificial Sequence
  source: /note="Description of Artificial Sequence: Synthetic peptide"
GYTFTSYD

SEQ ID NO: 1704 - protein, 8 aa, Artificial Sequence
  source: /note="Description of Artificial Sequence: Synthetic peptide"
IDPQSGGE

SEQ ID NO: 1705 - protein, 11 aa, Artificial Sequence
  source: /note="Description of Artificial Sequence: Synthetic peptide"
ARYDYGGYFDV

SEQ ID NO: 1706 - protein, 6 aa, Artificial Sequence
  source: /note="Description of Artificial Sequence: Synthetic peptide"
QDIYNY

SEQ ID NO: 1707 - protein, 3 aa, Artificial Sequence
  source: /note="Description of Artificial Sequence: Synthetic peptide"
YTS

SEQ ID NO: 1708 - protein, 9 aa, Artificial Sequence
  source: /note="Description of Artificial Sequence: Synthetic peptide"
QQGDTLPWT

SEQ ID NO: 1709 - protein, 5 aa, Artificial Sequence
  source: /note="Description of Artificial Sequence: Synthetic peptide"
DYDMH

SEQ ID NO: 1710 - protein, 17 aa, Artificial Sequence
  source: /note="Description of Artificial Sequence: Synthetic peptide"
RIDPQSGDHDYAQKFQG

SEQ ID NO: 1711 - protein, 9 aa, Artificial Sequence
  source: /note="Description of Artificial Sequence: Synthetic peptide"
YDHGGYFDV

SEQ ID NO: 1712 - protein, 11 aa, Artificial Sequence
  source: /note="Description of Artificial Sequence: Synthetic peptide"
RASQDIYNYLN

SEQ ID NO: 1713 - protein, 7 aa, Artificial Sequence
  source: /note="Description of Artificial Sequence: Synthetic peptide"
YTSRLHS

SEQ ID NO: 1714 - protein, 9 aa, Artificial Sequence
  source: /note="Description of Artificial Sequence: Synthetic peptide"
QQGDTLPWT

SEQ ID NO: 1715 - protein, 7 aa, Artificial Sequence
  source: /note="Description of Artificial Sequence: Synthetic peptide"
GYTFTDY

SEQ ID NO: 1716 - protein, 6 aa, Artificial Sequence
  source: /note="Description of Artificial Sequence: Synthetic peptide"
DPQSGD

SEQ ID NO: 1717 - protein, 9 aa, Artificial Sequence
  source: /note="Description of Artificial Sequence: Synthetic peptide"
YDHGGYFDV

SEQ ID NO: 1718 - protein, 11 aa, Artificial Sequence
  source: /note="Description of Artificial Sequence: Synthetic peptide"
RASQDIYNYLN

SEQ ID NO: 1719 - protein, 7 aa, Artificial Sequence
  source: /note="Description of Artificial Sequence: Synthetic peptide"
YTSRLHS

SEQ ID NO: 1720 - protein, 9 aa, Artificial Sequence
  source: /note="Description of Artificial Sequence: Synthetic peptide"
QQGDTLPWT

SEQ ID NO: 1721 - protein, 10 aa, Artificial Sequence
  source: /note="Description of Artificial Sequence: Synthetic peptide"
GYTFTDYDMH

SEQ ID NO: 1722 - protein, 10 aa, Artificial Sequence
  source: /note="Description of Artificial Sequence: Synthetic peptide"
RIDPQSGDHD

SEQ ID NO: 1723 - protein, 9 aa, Artificial Sequence
  source: /note="Description of Artificial Sequence: Synthetic peptide"
YDHGGYFDV

SEQ ID NO: 1724 - protein, 11 aa, Artificial Sequence
  source: /note="Description of Artificial Sequence: Synthetic peptide"
RASQDIYNYLN

SEQ ID NO: 1725 - protein, 7 aa, Artificial Sequence
  source: /note="Description of Artificial Sequence: Synthetic peptide"
YTSRLHS

SEQ ID NO: 1726 - protein, 9 aa, Artificial Sequence
  source: /note="Description of Artificial Sequence: Synthetic peptide"
QQGDTLPWT

SEQ ID NO: 1727 - protein, 8 aa, Artificial Sequence
  source: /note="Description of Artificial Sequence: Synthetic peptide"
GYTFTDYD

SEQ ID NO: 1728 - protein, 8 aa, Artificial Sequence
  source: /note="Description of Artificial Sequence: Synthetic peptide"
IDPQSGDH

SEQ ID NO: 1729 - protein, 11 aa, Artificial Sequence
  source: /note="Description of Artificial Sequence: Synthetic peptide"
ARYDHGGYFDV

SEQ ID NO: 1730 - protein, 6 aa, Artificial Sequence
  source: /note="Description of Artificial Sequence: Synthetic peptide"
QDIYNY

SEQ ID NO: 1731 - protein, 3 aa, Artificial Sequence
  source: /note="Description of Artificial Sequence: Synthetic peptide"
YTS

SEQ ID NO: 1732 - protein, 9 aa, Artificial Sequence
  source: /note="Description of Artificial Sequence: Synthetic peptide"
QQGDTLPWT

SEQ ID NO: 1733 - protein, 5 aa, Artificial Sequence
  source: /note="Description of Artificial Sequence: Synthetic peptide"
SYDMH

SEQ ID NO: 1734 - protein, 17 aa, Artificial Sequence
  source: /note="Description of Artificial Sequence: Synthetic peptide"
RIDPYGGGIKYAQKFQG

SEQ ID NO: 1735 - protein, 9 aa, Artificial Sequence
  source: /note="Description of Artificial Sequence: Synthetic peptide"
YDHGGYFDV

SEQ ID NO: 1736 - protein, 11 aa, Artificial Sequence
  source: /note="Description of Artificial Sequence: Synthetic peptide"
RASQDIYNYLN

SEQ ID NO: 1737 - protein, 7 aa, Artificial Sequence
  source: /note="Description of Artificial Sequence: Synthetic peptide"
YTSRLHS

SEQ ID NO: 1738 - protein, 9 aa, Artificial Sequence
  source: /note="Description of Artificial Sequence: Synthetic peptide"
QQGDTLPWT

SEQ ID NO: 1739 - protein, 7 aa, Artificial Sequence
  source: /note="Description of Artificial Sequence: Synthetic peptide"
GYTFTSY

SEQ ID NO: 1740 - protein, 6 aa, Artificial Sequence
  source: /note="Description of Artificial Sequence: Synthetic peptide"
DPYGGG

SEQ ID NO: 1741 - protein, 9 aa, Artificial Sequence
  source: /note="Description of Artificial Sequence: Synthetic peptide"
YDHGGYFDV

SEQ ID NO: 1742 - protein, 11 aa, Artificial Sequence
  source: /note="Description of Artificial Sequence: Synthetic peptide"
RASQDIYNYLN

SEQ ID NO: 1743 - protein, 7 aa, Artificial Sequence
  source: /note="Description of Artificial Sequence: Synthetic peptide"
YTSRLHS

SEQ ID NO: 1744 - protein, 9 aa, Artificial Sequence
  source: /note="Description of Artificial Sequence: Synthetic peptide"
QQGDTLPWT

SEQ ID NO: 1745 - protein, 10 aa, Artificial Sequence
  source: /note="Description of Artificial Sequence: Synthetic peptide"
GYTFTSYDMH

SEQ ID NO: 1746 - protein, 10 aa, Artificial Sequence
  source: /note="Description of Artificial Sequence: Synthetic peptide"
RIDPYGGGIK

SEQ ID NO: 1747 - protein, 9 aa, Artificial Sequence
  source: /note="Description of Artificial Sequence: Synthetic peptide"
YDHGGYFDV

SEQ ID NO: 1748 - protein, 11 aa, Artificial Sequence
  source: /note="Description of Artificial Sequence: Synthetic peptide"
RASQDIYNYLN

SEQ ID NO: 1749 - protein, 7 aa, Artificial Sequence
  source: /note="Description of Artificial Sequence: Synthetic peptide"
YTSRLHS

SEQ ID NO: 1750 - protein, 9 aa, Artificial Sequence
  source: /note="Description of Artificial Sequence: Synthetic peptide"
QQGDTLPWT

SEQ ID NO: 1751 - protein, 8 aa, Artificial Sequence
  source: /note="Description of Artificial Sequence: Synthetic peptide"
GYTFTSYD

SEQ ID NO: 1752 - protein, 8 aa, Artificial Sequence
  source: /note="Description of Artificial Sequence: Synthetic peptide"
IDPYGGGI

SEQ ID NO: 1753 - protein, 11 aa, Artificial Sequence
  source: /note="Description of Artificial Sequence: Synthetic peptide"
ARYDHGGYFDV

SEQ ID NO: 1754 - protein, 6 aa, Artificial Sequence
  source: /note="Description of Artificial Sequence: Synthetic peptide"
QDIYNY

SEQ ID NO: 1755 - protein, 3 aa, Artificial Sequence
  source: /note="Description of Artificial Sequence: Synthetic peptide"
YTS

SEQ ID NO: 1756 - protein, 9 aa, Artificial Sequence
  source: /note="Description of Artificial Sequence: Synthetic peptide"
QQGDTLPWT

SEQ ID NO: 1757 - protein, 5 aa, Artificial Sequence
  source: /note="Description of Artificial Sequence: Synthetic peptide"
FYDIH

SEQ ID NO: 1758 - protein, 17 aa, Artificial Sequence
  source: /note="Description of Artificial Sequence: Synthetic peptide"
RIDPQSGGIKYAQKFQG

SEQ ID NO: 1759 - protein, 9 aa, Artificial Sequence
  source: /note="Description of Artificial Sequence: Synthetic peptide"
WDYGGYFDV

SEQ ID NO: 1760 - protein, 11 aa, Artificial Sequence
  source: /note="Description of Artificial Sequence: Synthetic peptide"
RASQDIYNYLN

SEQ ID NO: 1761 - protein, 7 aa, Artificial Sequence
  source: /note="Description of Artificial Sequence: Synthetic peptide"
YTSRLHS

SEQ ID NO: 1762 - protein, 9 aa, Artificial Sequence
  source: /note="Description of Artificial Sequence: Synthetic peptide"
QQGDTLPWT

SEQ ID NO: 1763 - protein, 7 aa, Artificial Sequence
  source: /note="Description of Artificial Sequence: Synthetic peptide"
GYTFTFY

SEQ ID NO: 1764 - protein, 6 aa, Artificial Sequence
  source: /note="Description of Artificial Sequence: Synthetic peptide"
DPQSGG

SEQ ID NO: 1765 - protein, 9 aa, Artificial Sequence
  source: /note="Description of Artificial Sequence: Synthetic peptide"
WDYGGYFDV

SEQ ID NO: 1766 - protein, 11 aa, Artificial Sequence
  source: /note="Description of Artificial Sequence: Synthetic peptide"
RASQDIYNYLN

SEQ ID NO: 1767 - protein, 7 aa, Artificial Sequence
  source: /note="Description of Artificial Sequence: Synthetic peptide"
YTSRLHS

SEQ ID NO: 1768 - protein, 9 aa, Artificial Sequence
  source: /note="Description of Artificial Sequence: Synthetic peptide"
QQGDTLPWT

SEQ ID NO: 1769 - protein, 10 aa, Artificial Sequence
  source: /note="Description of Artificial Sequence: Synthetic peptide"
GYTFTFYDIH

SEQ ID NO: 1770 - protein, 10 aa, Artificial Sequence
  source: /note="Description of Artificial Sequence: Synthetic peptide"
RIDPQSGGIK

SEQ ID NO: 1771 - protein, 9 aa, Artificial Sequence
  source: /note="Description of Artificial Sequence: Synthetic peptide"
WDYGGYFDV

SEQ ID NO: 1772 - protein, 11 aa, Artificial Sequence
  source: /note="Description of Artificial Sequence: Synthetic peptide"
RASQDIYNYLN

SEQ ID NO: 1773 - protein, 7 aa, Artificial Sequence
  source: /note="Description of Artificial Sequence: Synthetic peptide"
YTSRLHS

SEQ ID NO: 1774 - protein, 9 aa, Artificial Sequence
  source: /note="Description of Artificial Sequence: Synthetic peptide"
QQGDTLPWT

SEQ ID NO: 1775 - protein, 8 aa, Artificial Sequence
  source: /note="Description of Artificial Sequence: Synthetic peptide"
GYTFTFYD

SEQ ID NO: 1776 - protein, 8 aa, Artificial Sequence
  source: /note="Description of Artificial Sequence: Synthetic peptide"
IDPQSGGI

SEQ ID NO: 1777 - protein, 11 aa, Artificial Sequence
  source: /note="Description of Artificial Sequence: Synthetic peptide"
ARWDYGGYFDV

SEQ ID NO: 1778 - protein, 6 aa, Artificial Sequence
  source: /note="Description of Artificial Sequence: Synthetic peptide"
QDIYNY

SEQ ID NO: 1779 - protein, 3 aa, Artificial Sequence
  source: /note="Description of Artificial Sequence: Synthetic peptide"
YTS

SEQ ID NO: 1780 - protein, 9 aa, Artificial Sequence
  source: /note="Description of Artificial Sequence: Synthetic peptide"
QQGDTLPWT

SEQ ID NO: 1781 - protein, 5 aa, Artificial Sequence
  source: /note="Description of Artificial Sequence: Synthetic peptide"
TYWMH

SEQ ID NO: 1782 - protein, 17 aa, Artificial Sequence
  source: /note="Description of Artificial Sequence: Synthetic peptide"
RIDPQSGGSKYAQKFQG

SEQ ID NO: 1783 - protein, 9 aa, Artificial Sequence
  source: /note="Description of Artificial Sequence: Synthetic peptide"
WDYGGYFDV

SEQ ID NO: 1784 - protein, 11 aa, Artificial Sequence
  source: /note="Description of Artificial Sequence: Synthetic peptide"
RASQDIYNYLN

SEQ ID NO: 1785 - protein, 7 aa, Artificial Sequence
  source: /note="Description of Artificial Sequence: Synthetic peptide"
YTSHLHS

SEQ ID NO: 1786 - protein, 9 aa, Artificial Sequence
  source: /note="Description of Artificial Sequence: Synthetic peptide"
QQGDTLPWT

SEQ ID NO: 1787 - protein, 7 aa, Artificial Sequence
  source: /note="Description of Artificial Sequence: Synthetic peptide"
GYTFTTY

SEQ ID NO: 1788 - protein, 6 aa, Artificial Sequence
  source: /note="Description of Artificial Sequence: Synthetic peptide"
DPQSGG

SEQ ID NO: 1789 - protein, 9 aa, Artificial Sequence
  source: /note="Description of Artificial Sequence: Synthetic peptide"
WDYGGYFDV

SEQ ID NO: 1790 - protein, 11 aa, Artificial Sequence
  source: /note="Description of Artificial Sequence: Synthetic peptide"
RASQDIYNYLN

SEQ ID NO: 1791 - protein, 7 aa, Artificial Sequence
  source: /note="Description of Artificial Sequence: Synthetic peptide"
YTSHLHS

SEQ ID NO: 1792 - protein, 9 aa, Artificial Sequence
  source: /note="Description of Artificial Sequence: Synthetic peptide"
QQGDTLPWT

SEQ ID NO: 1793 - protein, 10 aa, Artificial Sequence
  source: /note="Description of Artificial Sequence: Synthetic peptide"
GYTFTTYWMH

SEQ ID NO: 1794 - protein, 10 aa, Artificial Sequence
  source: /note="Description of Artificial Sequence: Synthetic peptide"
RIDPQSGGSK

SEQ ID NO: 1795 - protein, 9 aa, Artificial Sequence
  source: /note="Description of Artificial Sequence: Synthetic peptide"
WDYGGYFDV

SEQ ID NO: 1796 - protein, 11 aa, Artificial Sequence
  source: /note="Description of Artificial Sequence: Synthetic peptide"
RASQDIYNYLN

SEQ ID NO: 1797 - protein, 7 aa, Artificial Sequence
  source: /note="Description of Artificial Sequence: Synthetic peptide"
YTSHLHS

SEQ ID NO: 1798 - protein, 9 aa, Artificial Sequence
  source: /note="Description of Artificial Sequence: Synthetic peptide"
QQGDTLPWT

SEQ ID NO: 1799 - protein, 8 aa, Artificial Sequence
  source: /note="Description of Artificial Sequence: Synthetic peptide"
GYTFTTYW

SEQ ID NO: 1800 - protein, 8 aa, Artificial Sequence
  source: /note="Description of Artificial Sequence: Synthetic peptide"
IDPQSGGS

SEQ ID NO: 1801 - protein, 11 aa, Artificial Sequence
  source: /note="Description of Artificial Sequence: Synthetic peptide"
ARWDYGGYFDV

SEQ ID NO: 1802 - protein, 6 aa, Artificial Sequence
  source: /note="Description of Artificial Sequence: Synthetic peptide"
QDIYNY

SEQ ID NO: 1803 - protein, 3 aa, Artificial Sequence
  source: /note="Description of Artificial Sequence: Synthetic peptide"
YTS

SEQ ID NO: 1804 - protein, 9 aa, Artificial Sequence
  source: /note="Description of Artificial Sequence: Synthetic peptide"
QQGDTLPWT

SEQ ID NO: 1805 - protein, 5 aa, Artificial Sequence
  source: /note="Description of Artificial Sequence: Synthetic peptide"
SYDLH

SEQ ID NO: 1806 - protein, 17 aa, Artificial Sequence
  source: /note="Description of Artificial Sequence: Synthetic peptide"
RIDPQSGGIKYAQKFQG

SEQ ID NO: 1807 - protein, 9 aa, Artificial Sequence
  source: /note="Description of Artificial Sequence: Synthetic peptide"
YDQGGYFDV

SEQ ID NO: 1808 - protein, 11 aa, Artificial Sequence
  source: /note="Description of Artificial Sequence: Synthetic peptide"
RASQDIYYYLN

SEQ ID NO: 1809 - protein, 7 aa, Artificial Sequence
  source: /note="Description of Artificial Sequence: Synthetic peptide"
YTSRLHS

SEQ ID NO: 1810 - protein, 9 aa, Artificial Sequence
  source: /note="Description of Artificial Sequence: Synthetic peptide"
QQGDTLPWT

SEQ ID NO: 1811 - protein, 7 aa, Artificial Sequence
  source: /note="Description of Artificial Sequence: Synthetic peptide"
GYTFTSY

SEQ ID NO: 1812 - protein, 6 aa, Artificial Sequence
  source: /note="Description of Artificial Sequence: Synthetic peptide"
DPQSGG

SEQ ID NO: 1813 - protein, 9 aa, Artificial Sequence
  source: /note="Description of Artificial Sequence: Synthetic peptide"
YDQGGYFDV

SEQ ID NO: 1814 - protein, 11 aa, Artificial Sequence
  source: /note="Description of Artificial Sequence: Synthetic peptide"
RASQDIYYYLN

SEQ ID NO: 1815 - protein, 7 aa, Artificial Sequence
  source: /note="Description of Artificial Sequence: Synthetic peptide"
YTSRLHS

SEQ ID NO: 1816 - protein, 9 aa, Artificial Sequence
  source: /note="Description of Artificial Sequence: Synthetic peptide"
QQGDTLPWT

SEQ ID NO: 1817 - protein, 10 aa, Artificial Sequence
  source: /note="Description of Artificial Sequence: Synthetic peptide"
GYTFTSYDLH

SEQ ID NO: 1818 - protein, 10 aa, Artificial Sequence
  source: /note="Description of Artificial Sequence: Synthetic peptide"
RIDPQSGGIK

SEQ ID NO: 1819 - protein, 9 aa, Artificial Sequence
  source: /note="Description of Artificial Sequence: Synthetic peptide"
YDQGGYFDV

SEQ ID NO: 1820 - protein, 11 aa, Artificial Sequence
  source: /note="Description of Artificial Sequence: Synthetic peptide"
RASQDIYYYLN

SEQ ID NO: 1821 - protein, 7 aa, Artificial Sequence
  source: /note="Description of Artificial Sequence: Synthetic peptide"
YTSRLHS

SEQ ID NO: 1822 - protein, 9 aa, Artificial Sequence
  source: /note="Description of Artificial Sequence: Synthetic peptide"
QQGDTLPWT

SEQ ID NO: 1823 - protein, 8 aa, Artificial Sequence
  source: /note="Description of Artificial Sequence: Synthetic peptide"
GYTFTSYD

SEQ ID NO: 1824 - protein, 8 aa, Artificial Sequence
  source: /note="Description of Artificial Sequence: Synthetic peptide"
IDPQSGGI

SEQ ID NO: 1825 - protein, 11 aa, Artificial Sequence
  source: /note="Description of Artificial Sequence: Synthetic peptide"
ARYDQGGYFDV

SEQ ID NO: 1826 - protein, 6 aa, Artificial Sequence
  source: /note="Description of Artificial Sequence: Synthetic peptide"
QDIYYY

SEQ ID NO: 1827 - protein, 3 aa, Artificial Sequence
  source: /note="Description of Artificial Sequence: Synthetic peptide"
YTS

SEQ ID NO: 1828 - protein, 9 aa, Artificial Sequence
  source: /note="Description of Artificial Sequence: Synthetic peptide"
QQGDTLPWT

SEQ ID NO: 1829 - protein, 5 aa, Artificial Sequence
  source: /note="Description of Artificial Sequence: Synthetic peptide"
SYDMH

SEQ ID NO: 1830 - protein, 17 aa, Artificial Sequence
  source: /note="Description of Artificial Sequence: Synthetic peptide"
RIDPQTGGIKYAQKFQG

SEQ ID NO: 1831 - protein, 9 aa, Artificial Sequence
  source: /note="Description of Artificial Sequence: Synthetic peptide"
WDHGGYFDV

SEQ ID NO: 1832 - protein, 11 aa, Artificial Sequence
  source: /note="Description of Artificial Sequence: Synthetic peptide"
RASQDIYNYLN

SEQ ID NO: 1833 - protein, 7 aa, Artificial Sequence
  source: /note="Description of Artificial Sequence: Synthetic peptide"
YTSRLHS

SEQ ID NO: 1834 - protein, 9 aa, Artificial Sequence
  source: /note="Description of Artificial Sequence: Synthetic peptide"
QQGDTQPWT

SEQ ID NO: 1835 - protein, 7 aa, Artificial Sequence
  source: /note="Description of Artificial Sequence: Synthetic peptide"
GYTFTSY

SEQ ID NO: 1836 - protein, 6 aa, Artificial Sequence
  source: /note="Description of Artificial Sequence: Synthetic peptide"
DPQTGG

SEQ ID NO: 1837 - protein, 9 aa, Artificial Sequence
  source: /note="Description of Artificial Sequence: Synthetic peptide"
WDHGGYFDV

SEQ ID NO: 1838 - protein, 11 aa, Artificial Sequence
  source: /note="Description of Artificial Sequence: Synthetic peptide"
RASQDIYNYLN

SEQ ID NO: 1839 - protein, 7 aa, Artificial Sequence
  source: /note="Description of Artificial Sequence: Synthetic peptide"
YTSRLHS

SEQ ID NO: 1840 - protein, 9 aa, Artificial Sequence
  source: /note="Description of Artificial Sequence: Synthetic peptide"
QQGDTQPWT

SEQ ID NO: 1841 - protein, 10 aa, Artificial Sequence
  source: /note="Description of Artificial Sequence: Synthetic peptide"
GYTFTSYDMH

SEQ ID NO: 1842 - protein, 10 aa, Artificial Sequence
  source: /note="Description of Artificial Sequence: Synthetic peptide"
RIDPQTGGIK

SEQ ID NO: 1843 - protein, 9 aa, Artificial Sequence
  source: /note="Description of Artificial Sequence: Synthetic peptide"
WDHGGYFDV

SEQ ID NO: 1844 - protein, 11 aa, Artificial Sequence
  source: /note="Description of Artificial Sequence: Synthetic peptide"
RASQDIYNYLN

SEQ ID NO: 1845 - protein, 7 aa, Artificial Sequence
  source: /note="Description of Artificial Sequence: Synthetic peptide"
YTSRLHS

SEQ ID NO: 1846 - protein, 9 aa, Artificial Sequence
  source: /note="Description of Artificial Sequence: Synthetic peptide"
QQGDTQPWT

SEQ ID NO: 1847 - protein, 8 aa, Artificial Sequence
  source: /note="Description of Artificial Sequence: Synthetic peptide"
GYTFTSYD

SEQ ID NO: 1848 - protein, 8 aa, Artificial Sequence
  source: /note="Description of Artificial Sequence: Synthetic peptide"
IDPQTGGI

SEQ ID NO: 1849 - protein, 11 aa, Artificial Sequence
  source: /note="Description of Artificial Sequence: Synthetic peptide"
ARWDHGGYFDV

SEQ ID NO: 1850 - protein, 6 aa, Artificial Sequence
  source: /note="Description of Artificial Sequence: Synthetic peptide"
QDIYNY

SEQ ID NO: 1851 - protein, 3 aa, Artificial Sequence
  source: /note="Description of Artificial Sequence: Synthetic peptide"
YTS

SEQ ID NO: 1852 - protein, 9 aa, Artificial Sequence
  source: /note="Description of Artificial Sequence: Synthetic peptide"
QQGDTQPWT

SEQ ID NO: 1853 - protein, 5 aa, Artificial Sequence
  source: /note="Description of Artificial Sequence: Synthetic peptide"
SYDMH

SEQ ID NO: 1854 - protein, 17 aa, Artificial Sequence
  source: /note="Description of Artificial Sequence: Synthetic peptide"
RIDPQSGGIKYAQKFQG

SEQ ID NO: 1855 - protein, 9 aa, Artificial Sequence
  source: /note="Description of Artificial Sequence: Synthetic peptide"
WDYGGYFDV

SEQ ID NO: 1856 - protein, 11 aa, Artificial Sequence
  source: /note="Description of Artificial Sequence: Synthetic peptide"
RASQDIYNYLN

SEQ ID NO: 1857 - protein, 7 aa, Artificial Sequence
  source: /note="Description of Artificial Sequence: Synthetic peptide"
YTSVLHS

SEQ ID NO: 1858 - protein, 9 aa, Artificial Sequence
  source: /note="Description of Artificial Sequence: Synthetic peptide"
QQGDTLPWT

SEQ ID NO: 1859 - protein, 7 aa, Artificial Sequence
  source: /note="Description of Artificial Sequence: Synthetic peptide"
GYTFTSY

SEQ ID NO: 1860 - protein, 6 aa, Artificial Sequence
  source: /note="Description of Artificial Sequence: Synthetic peptide"
DPQSGG

SEQ ID NO: 1861 - protein, 9 aa, Artificial Sequence
  source: /note="Description of Artificial Sequence: Synthetic peptide"
WDYGGYFDV

SEQ ID NO: 1862 - protein, 11 aa, Artificial Sequence
  source: /note="Description of Artificial Sequence: Synthetic peptide"
RASQDIYNYLN

SEQ ID NO: 1863 - protein, 7 aa, Artificial Sequence
  source: /note="Description of Artificial Sequence: Synthetic peptide"
YTSVLHS

SEQ ID NO: 1864 - protein, 9 aa, Artificial Sequence
  source: /note="Description of Artificial Sequence: Synthetic peptide"
QQGDTLPWT

SEQ ID NO: 1865 - protein, 10 aa, Artificial Sequence
  source: /note="Description of Artificial Sequence: Synthetic peptide"
GYTFTSYDMH

SEQ ID NO: 1866 - protein, 10 aa, Artificial Sequence
  source: /note="Description of Artificial Sequence: Synthetic peptide"
RIDPQSGGIK

SEQ ID NO: 1867 - protein, 9 aa, Artificial Sequence
  source: /note="Description of Artificial Sequence: Synthetic peptide"
WDYGGYFDV

SEQ ID NO: 1868 - protein, 11 aa, Artificial Sequence
  source: /note="Description of Artificial Sequence: Synthetic peptide"
RASQDIYNYLN

SEQ ID NO: 1869 - protein, 7 aa, Artificial Sequence
  source: /note="Description of Artificial Sequence: Synthetic peptide"
YTSVLHS

SEQ ID NO: 1870 - protein, 9 aa, Artificial Sequence
  source: /note="Description of Artificial Sequence: Synthetic peptide"
QQGDTLPWT

SEQ ID NO: 1871 - protein, 8 aa, Artificial Sequence
  source: /note="Description of Artificial Sequence: Synthetic peptide"
GYTFTSYD

SEQ ID NO: 1872 - protein, 8 aa, Artificial Sequence
  source: /note="Description of Artificial Sequence: Synthetic peptide"
IDPQSGGI

SEQ ID NO: 1873 - protein, 11 aa, Artificial Sequence
  source: /note="Description of Artificial Sequence: Synthetic peptide"
ARWDYGGYFDV

SEQ ID NO: 1874 - protein, 6 aa, Artificial Sequence
  source: /note="Description of Artificial Sequence: Synthetic peptide"
QDIYNY

SEQ ID NO: 1875 - protein, 3 aa, Artificial Sequence
  source: /note="Description of Artificial Sequence: Synthetic peptide"
YTS

SEQ ID NO: 1876 - protein, 9 aa, Artificial Sequence
  source: /note="Description of Artificial Sequence: Synthetic peptide"
QQGDTLPWT

SEQ ID NO: 1877 - protein, 5 aa, Artificial Sequence
  source: /note="Description of Artificial Sequence: Synthetic peptide"
SYWMQ

SEQ ID NO: 1878 - protein, 17 aa, Artificial Sequence
  source: /note="Description of Artificial Sequence: Synthetic peptide"
RIDPQDGDIKYAQKFQG

SEQ ID NO: 1879 - protein, 9 aa, Artificial Sequence
  source: /note="Description of Artificial Sequence: Synthetic peptide"
YDYGGYFDV

SEQ ID NO: 1880 - protein, 11 aa, Artificial Sequence
  source: /note="Description of Artificial Sequence: Synthetic peptide"
RASQDIYNYLN

SEQ ID NO: 1881 - protein, 7 aa, Artificial Sequence
  source: /note="Description of Artificial Sequence: Synthetic peptide"
YTSVLHS

SEQ ID NO: 1882 - protein, 9 aa, Artificial Sequence
  source: /note="Description of Artificial Sequence: Synthetic peptide"
QQGDTLPWT

SEQ ID NO: 1883 - protein, 7 aa, Artificial Sequence
  source: /note="Description of Artificial Sequence: Synthetic peptide"
GYTFTSY

SEQ ID NO: 1884 - protein, 6 aa, Artificial Sequence
  source: /note="Description of Artificial Sequence: Synthetic peptide"
DPQDGD

SEQ ID NO: 1885 - protein, 9 aa, Artificial Sequence
  source: /note="Description of Artificial Sequence: Synthetic peptide"
YDYGGYFDV

SEQ ID NO: 1886 - protein, 11 aa, Artificial Sequence
  source: /note="Description of Artificial Sequence: Synthetic peptide"
RASQDIYNYLN

SEQ ID NO: 1887 - protein, 7 aa, Artificial Sequence
  source: /note="Description of Artificial Sequence: Synthetic peptide"
YTSVLHS

SEQ ID NO: 1888 - protein, 9 aa, Artificial Sequence
  source: /note="Description of Artificial Sequence: Synthetic peptide"
QQGDTLPWT

SEQ ID NO: 1889 - protein, 10 aa, Artificial Sequence
  source: /note="Description of Artificial Sequence: Synthetic peptide"
GYTFTSYWMQ

SEQ ID NO: 1890 - protein, 10 aa, Artificial Sequence
  source: /note="Description of Artificial Sequence: Synthetic peptide"
RIDPQDGDIK

SEQ ID NO: 1891 - protein, 9 aa, Artificial Sequence
  source: /note="Description of Artificial Sequence: Synthetic peptide"
YDYGGYFDV

SEQ ID NO: 1892 - protein, 11 aa, Artificial Sequence
  source: /note="Description of Artificial Sequence: Synthetic peptide"
RASQDIYNYLN

SEQ ID NO: 1893 - protein, 7 aa, Artificial Sequence
  source: /note="Description of Artificial Sequence: Synthetic peptide"
YTSVLHS

SEQ ID NO: 1894 - protein, 9 aa, Artificial Sequence
  source: /note="Description of Artificial Sequence: Synthetic peptide"
QQGDTLPWT

SEQ ID NO: 1895 - protein, 8 aa, Artificial Sequence
  source: /note="Description of Artificial Sequence: Synthetic peptide"
GYTFTSYW

SEQ ID NO: 1896 - protein, 8 aa, Artificial Sequence
  source: /note="Description of Artificial Sequence: Synthetic peptide"
IDPQDGDI

SEQ ID NO: 1897 - protein, 11 aa, Artificial Sequence
  source: /note="Description of Artificial Sequence: Synthetic peptide"
ARYDYGGYFDV

SEQ ID NO: 1898 - protein, 6 aa, Artificial Sequence
  source: /note="Description of Artificial Sequence: Synthetic peptide"
QDIYNY

SEQ ID NO: 1899 - protein, 3 aa, Artificial Sequence
  source: /note="Description of Artificial Sequence: Synthetic peptide"
YTS

SEQ ID NO: 1900 - protein, 9 aa, Artificial Sequence
  source: /note="Description of Artificial Sequence: Synthetic peptide"
QQGDTLPWT

SEQ ID NO: 1901 - protein, 5 aa, Artificial Sequence
  source: /note="Description of Artificial Sequence: Synthetic peptide"
SYDMH

SEQ ID NO: 1902 - protein, 17 aa, Artificial Sequence
  source: /note="Description of Artificial Sequence: Synthetic peptide"
RIDPQSGGTKYAQKFQG

SEQ ID NO: 1903 - protein, 9 aa, Artificial Sequence
  source: /note="Description of Artificial Sequence: Synthetic peptide"
WDYGGYFDV

SEQ ID NO: 1904 - protein, 11 aa, Artificial Sequence
  source: /note="Description of Artificial Sequence: Synthetic peptide"
RASQDIYNYLN

SEQ ID NO: 1905 - protein, 7 aa, Artificial Sequence
  source: /note="Description of Artificial Sequence: Synthetic peptide"
YTSVLHS

SEQ ID NO: 1906 - protein, 9 aa, Artificial Sequence
  source: /note="Description of Artificial Sequence: Synthetic peptide"
QQGDTLPWT

SEQ ID NO: 1907 - protein, 7 aa, Artificial Sequence
  source: /note="Description of Artificial Sequence: Synthetic peptide"
GYTFTSY

SEQ ID NO: 1908 - protein, 6 aa, Artificial Sequence
  source: /note="Description of Artificial Sequence: Synthetic peptide"
DPQSGG

SEQ ID NO: 1909 - protein, 9 aa, Artificial Sequence
  source: /note="Description of Artificial Sequence: Synthetic peptide"
WDYGGYFDV

SEQ ID NO: 1910 - protein, 11 aa, Artificial Sequence
  source: /note="Description of Artificial Sequence: Synthetic peptide"
RASQDIYNYLN

SEQ ID NO: 1911 - protein, 7 aa, Artificial Sequence
  source: /note="Description of Artificial Sequence: Synthetic peptide"
YTSVLHS

SEQ ID NO: 1912 - protein, 9 aa, Artificial Sequence
  source: /note="Description of Artificial Sequence: Synthetic peptide"
QQGDTLPWT

SEQ ID NO: 1913 - protein, 10 aa, Artificial Sequence
  source: /note="Description of Artificial Sequence: Synthetic peptide"
GYTFTSYDMH

SEQ ID NO: 1914 - protein, 10 aa, Artificial Sequence
  source: /note="Description of Artificial Sequence: Synthetic peptide"
RIDPQSGGTK

SEQ ID NO: 1915 - protein, 9 aa, Artificial Sequence
  source: /note="Description of Artificial Sequence: Synthetic peptide"
WDYGGYFDV

SEQ ID NO: 1916 - protein, 11 aa, Artificial Sequence
  source: /note="Description of Artificial Sequence: Synthetic peptide"
RASQDIYNYLN

SEQ ID NO: 1917 - protein, 7 aa, Artificial Sequence
  source: /note="Description of Artificial Sequence: Synthetic peptide"
YTSVLHS

SEQ ID NO: 1918 - protein, 9 aa, Artificial Sequence
  source: /note="Description of Artificial Sequence: Synthetic peptide"
QQGDTLPWT

SEQ ID NO: 1919 - protein, 8 aa, Artificial Sequence
  source: /note="Description of Artificial Sequence: Synthetic peptide"
GYTFTSYD

SEQ ID NO: 1920 - protein, 8 aa, Artificial Sequence
  source: /note="Description of Artificial Sequence: Synthetic peptide"
IDPQSGGT

SEQ ID NO: 1921 - protein, 11 aa, Artificial Sequence
  source: /note="Description of Artificial Sequence: Synthetic peptide"
ARWDYGGYFDV

SEQ ID NO: 1922 - protein, 6 aa, Artificial Sequence
  source: /note="Description of Artificial Sequence: Synthetic peptide"
QDIYNY

SEQ ID NO: 1923 - protein, 3 aa, Artificial Sequence
  source: /note="Description of Artificial Sequence: Synthetic peptide"
YTS

SEQ ID NO: 1924 - protein, 9 aa, Artificial Sequence
  source: /note="Description of Artificial Sequence: Synthetic peptide"
QQGDTLPWT

SEQ ID NO: 1925 - protein, 5 aa, Artificial Sequence
  source: /note="Description of Artificial Sequence: Synthetic peptide"
SYDMH

SEQ ID NO: 1926 - protein, 17 aa, Artificial Sequence
  source: /note="Description of Artificial Sequence: Synthetic peptide"
RIDPQTGDIKYAQKFQG

SEQ ID NO: 1927 - protein, 9 aa, Artificial Sequence
  source: /note="Description of Artificial Sequence: Synthetic peptide"
WDYGGQFDV

SEQ ID NO: 1928 - protein, 11 aa, Artificial Sequence
  source: /note="Description of Artificial Sequence: Synthetic peptide"
RASQDIYNYLN

SEQ ID NO: 1929 - protein, 7 aa, Artificial Sequence
  source: /note="Description of Artificial Sequence: Synthetic peptide"
YTSGLHS

SEQ ID NO: 1930 - protein, 9 aa, Artificial Sequence
  source: /note="Description of Artificial Sequence: Synthetic peptide"
QQGDTLPWT

SEQ ID NO: 1931 - protein, 7 aa, Artificial Sequence
  source: /note="Description of Artificial Sequence: Synthetic peptide"
GYTFTSY

SEQ ID NO: 1932 - protein, 6 aa, Artificial Sequence
  source: /note="Description of Artificial Sequence: Synthetic peptide"
DPQTGD

SEQ ID NO: 1933 - protein, 9 aa, Artificial Sequence
  source: /note="Description of Artificial Sequence: Synthetic peptide"
WDYGGQFDV

SEQ ID NO: 1934 - protein, 11 aa, Artificial Sequence
  source: /note="Description of Artificial Sequence: Synthetic peptide"
RASQDIYNYLN

SEQ ID NO: 1935 - protein, 7 aa, Artificial Sequence
  source: /note="Description of Artificial Sequence: Synthetic peptide"
YTSGLHS

SEQ ID NO: 1936 - protein, 9 aa, Artificial Sequence
  source: /note="Description of Artificial Sequence: Synthetic peptide"
QQGDTLPWT

SEQ ID NO: 1937 - protein, 10 aa, Artificial Sequence
  source: /note="Description of Artificial Sequence: Synthetic peptide"
GYTFTSYDMH

SEQ ID NO: 1938 - protein, 10 aa, Artificial Sequence
  source: /note="Description of Artificial Sequence: Synthetic peptide"
RIDPQTGDIK

SEQ ID NO: 1939 - protein, 9 aa, Artificial Sequence
  source: /note="Description of Artificial Sequence: Synthetic peptide"
WDYGGQFDV

SEQ ID NO: 1940 - protein, 11 aa, Artificial Sequence
  source: /note="Description of Artificial Sequence: Synthetic peptide"
RASQDIYNYLN

SEQ ID NO: 1941 - protein, 7 aa, Artificial Sequence
  source: /note="Description of Artificial Sequence: Synthetic peptide"
YTSGLHS

SEQ ID NO: 1942 - protein, 9 aa, Artificial Sequence
  source: /note="Description of Artificial Sequence: Synthetic peptide"
QQGDTLPWT

SEQ ID NO: 1943 - protein, 8 aa, Artificial Sequence
  source: /note="Description of Artificial Sequence: Synthetic peptide"
GYTFTSYD

SEQ ID NO: 1944 - protein, 8 aa, Artificial Sequence
  source: /note="Description of Artificial Sequence: Synthetic peptide"
IDPQTGDI

SEQ ID NO: 1945 - protein, 11 aa, Artificial Sequence
  source: /note="Description of Artificial Sequence: Synthetic peptide"
ARWDYGGQFDV

SEQ ID NO: 1946 - protein, 6 aa, Artificial Sequence
  source: /note="Description of Artificial Sequence: Synthetic peptide"
QDIYNY

SEQ ID NO: 1947 - protein, 3 aa, Artificial Sequence
  source: /note="Description of Artificial Sequence: Synthetic peptide"
YTS

SEQ ID NO: 1948 - protein, 9 aa, Artificial Sequence
  source: /note="Description of Artificial Sequence: Synthetic peptide"
QQGDTLPWT

SEQ ID NO: 1949 - protein, 5 aa, Artificial Sequence
  source: /note="Description of Artificial Sequence: Synthetic peptide"
QYDMH

SEQ ID NO: 1950 - protein, 17 aa, Artificial Sequence
  source: /note="Description of Artificial Sequence: Synthetic peptide"
RIDPQSGGIKYAQKFQG

SEQ ID NO: 1951 - protein, 9 aa, Artificial Sequence
  source: /note="Description of Artificial Sequence: Synthetic peptide"
YDYGGYFDV

SEQ ID NO: 1952 - protein, 11 aa, Artificial Sequence
  source: /note="Description of Artificial Sequence: Synthetic peptide"
RASQDIYNYLN

SEQ ID NO: 1953 - protein, 7 aa, Artificial Sequence
  source: /note="Description of Artificial Sequence: Synthetic peptide"
YTSILHS

SEQ ID NO: 1954 - protein, 9 aa, Artificial Sequence
  source: /note="Description of Artificial Sequence: Synthetic peptide"
QQGDTLPWT

SEQ ID NO: 1955 - protein, 7 aa, Artificial Sequence
  source: /note="Description of Artificial Sequence: Synthetic peptide"
GYTFTQY

SEQ ID NO: 1956 - protein, 6 aa, Artificial Sequence
  source: /note="Description of Artificial Sequence: Synthetic peptide"
DPQSGG

SEQ ID NO: 1957 - protein, 9 aa, Artificial Sequence
  source: /note="Description of Artificial Sequence: Synthetic peptide"
YDYGGYFDV

SEQ ID NO: 1958 - protein, 11 aa, Artificial Sequence
  source: /note="Description of Artificial Sequence: Synthetic peptide"
RASQDIYNYLN

SEQ ID NO: 1959 - protein, 7 aa, Artificial Sequence
  source: /note="Description of Artificial Sequence: Synthetic peptide"
YTSILHS

SEQ ID NO: 1960 - protein, 9 aa, Artificial Sequence
  source: /note="Description of Artificial Sequence: Synthetic peptide"
QQGDTLPWT

SEQ ID NO: 1961 - protein, 10 aa, Artificial Sequence
  source: /note="Description of Artificial Sequence: Synthetic peptide"
GYTFTQYDMH

SEQ ID NO: 1962 - protein, 10 aa, Artificial Sequence
  source: /note="Description of Artificial Sequence: Synthetic peptide"
RIDPQSGGIK

SEQ ID NO: 1963 - protein, 9 aa, Artificial Sequence
  source: /note="Description of Artificial Sequence: Synthetic peptide"
YDYGGYFDV

SEQ ID NO: 1964 - protein, 11 aa, Artificial Sequence
  source: /note="Description of Artificial Sequence: Synthetic peptide"
RASQDIYNYLN

SEQ ID NO: 1965 - protein, 7 aa, Artificial Sequence
  source: /note="Description of Artificial Sequence: Synthetic peptide"
YTSILHS

SEQ ID NO: 1966 - protein, 9 aa, Artificial Sequence
  source: /note="Description of Artificial Sequence: Synthetic peptide"
QQGDTLPWT

SEQ ID NO: 1967 - protein, 8 aa, Artificial Sequence
  source: /note="Description of Artificial Sequence: Synthetic peptide"
GYTFTQYD

SEQ ID NO: 1968 - protein, 8 aa, Artificial Sequence
  source: /note="Description of Artificial Sequence: Synthetic peptide"
IDPQSGGI

SEQ ID NO: 1969 - protein, 11 aa, Artificial Sequence
  source: /note="Description of Artificial Sequence: Synthetic peptide"
ARYDYGGYFDV

SEQ ID NO: 1970 - protein, 6 aa, Artificial Sequence
  source: /note="Description of Artificial Sequence: Synthetic peptide"
QDIYNY

SEQ ID NO: 1971 - protein, 3 aa, Artificial Sequence
  source: /note="Description of Artificial Sequence: Synthetic peptide"
YTS

SEQ ID NO: 1972 - protein, 9 aa, Artificial Sequence
  source: /note="Description of Artificial Sequence: Synthetic peptide"
QQGDTLPWT

SEQ ID NO: 1973 - protein, 5 aa, Artificial Sequence
  source: /note="Description of Artificial Sequence: Synthetic peptide"
SYDMH

SEQ ID NO: 1974 - protein, 17 aa, Artificial Sequence
  source: /note="Description of Artificial Sequence: Synthetic peptide"
RIDPQSGGIKYAQKFQG

SEQ ID NO: 1975 - protein, 9 aa, Artificial Sequence
  source: /note="Description of Artificial Sequence: Synthetic peptide"
WDYGGYFDV

SEQ ID NO: 1976 - protein, 11 aa, Artificial Sequence
  source: /note="Description of Artificial Sequence: Synthetic peptide"
RASQDIYNYLN

SEQ ID NO: 1977 - protein, 7 aa, Artificial Sequence
  source: /note="Description of Artificial Sequence: Synthetic peptide"
YTSRLHS

SEQ ID NO: 1978 - protein, 9 aa, Artificial Sequence
  source: /note="Description of Artificial Sequence: Synthetic peptide"
QQGDTLPWT

SEQ ID NO: 1979 - protein, 7 aa, Artificial Sequence
  source: /note="Description of Artificial Sequence: Synthetic peptide"
GYTFTSY

SEQ ID NO: 1980 - protein, 6 aa, Artificial Sequence
  source: /note="Description of Artificial Sequence: Synthetic peptide"
DPQSGG

SEQ ID NO: 1981 - protein, 9 aa, Artificial Sequence
  source: /note="Description of Artificial Sequence: Synthetic peptide"
WDYGGYFDV

SEQ ID NO: 1982 - protein, 11 aa, Artificial Sequence
  source: /note="Description of Artificial Sequence: Synthetic peptide"
RASQDIYNYLN

SEQ ID NO: 1983 - protein, 7 aa, Artificial Sequence
  source: /note="Description of Artificial Sequence: Synthetic peptide"
YTSRLHS

SEQ ID NO: 1984 - protein, 9 aa, Artificial Sequence
  source: /note="Description of Artificial Sequence: Synthetic peptide"
QQGDTLPWT

SEQ ID NO: 1985 - protein, 10 aa, Artificial Sequence
  source: /note="Description of Artificial Sequence: Synthetic peptide"
GYTFTSYDMH

SEQ ID NO: 1986 - protein, 10 aa, Artificial Sequence
  source: /note="Description of Artificial Sequence: Synthetic peptide"
RIDPQSGGIK

SEQ ID NO: 1987 - protein, 9 aa, Artificial Sequence
  source: /note="Description of Artificial Sequence: Synthetic peptide"
WDYGGYFDV

SEQ ID NO: 1988 - protein, 11 aa, Artificial Sequence
  source: /note="Description of Artificial Sequence: Synthetic peptide"
RASQDIYNYLN

SEQ ID NO: 1989 - protein, 7 aa, Artificial Sequence
  source: /note="Description of Artificial Sequence: Synthetic peptide"
YTSRLHS

SEQ ID NO: 1990 - protein, 9 aa, Artificial Sequence
  source: /note="Description of Artificial Sequence: Synthetic peptide"
QQGDTLPWT

SEQ ID NO: 1991 - protein, 8 aa, Artificial Sequence
  source: /note="Description of Artificial Sequence: Synthetic peptide"
GYTFTSYD

SEQ ID NO: 1992 - protein, 8 aa, Artificial Sequence
  source: /note="Description of Artificial Sequence: Synthetic peptide"
IDPQSGGI

SEQ ID NO: 1993 - protein, 11 aa, Artificial Sequence
  source: /note="Description of Artificial Sequence: Synthetic peptide"
ARWDYGGYFDV

SEQ ID NO: 1994 - protein, 6 aa, Artificial Sequence
  source: /note="Description of Artificial Sequence: Synthetic peptide"
QDIYNY

SEQ ID NO: 1995 - protein, 3 aa, Artificial Sequence
  source: /note="Description of Artificial Sequence: Synthetic peptide"
YTS

SEQ ID NO: 1996 - protein, 9 aa, Artificial Sequence
  source: /note="Description of Artificial Sequence: Synthetic peptide"
QQGDTLPWT

SEQ ID NO: 1997 - protein, 5 aa, Artificial Sequence
  source: /note="Description of Artificial Sequence: Synthetic peptide"
YYDLH

SEQ ID NO: 1998 - protein, 17 aa, Artificial Sequence
  source: /note="Description of Artificial Sequence: Synthetic peptide"
RIDPQSGGIKYAQKFQG

SEQ ID NO: 1999 - protein, 9 aa, Artificial Sequence
  source: /note="Description of Artificial Sequence: Synthetic peptide"
WDYGGYFDV

SEQ ID NO: 2000 - protein, 12 aa, Artificial Sequence
  source: /note="Description of Artificial Sequence: Synthetic peptide"
RASQDIYNYLNW

SEQ ID NO: 2001 - protein, 7 aa, Artificial Sequence
  source: /note="Description of Artificial Sequence: Synthetic peptide"
YTSRLHS

SEQ ID NO: 2002 - protein, 10 aa, Artificial Sequence
  source: /note="Description of Artificial Sequence: Synthetic peptide"
QQGDDIPWTF

SEQ ID NO: 2003 - protein, 7 aa, Artificial Sequence
  source: /note="Description of Artificial Sequence: Synthetic peptide"
GYTFTYY

SEQ ID NO: 2004 - protein, 5 aa, Artificial Sequence
  source: /note="Description of Artificial Sequence: Synthetic peptide"
DPQSG

SEQ ID NO: 2005 - protein, 9 aa, Artificial Sequence
  source: /note="Description of Artificial Sequence: Synthetic peptide"
WDYGGYFDV

SEQ ID NO: 2006 - protein, 12 aa, Artificial Sequence
  source: /note="Description of Artificial Sequence: Synthetic peptide"
RASQDIYNYLNW

SEQ ID NO: 2007 - protein, 7 aa, Artificial Sequence
  source: /note="Description of Artificial Sequence: Synthetic peptide"
YTSRLHS

SEQ ID NO: 2008 - protein, 10 aa, Artificial Sequence
  source: /note="Description of Artificial Sequence: Synthetic peptide"
QQGDDIPWTF

SEQ ID NO: 2009 - protein, 10 aa, Artificial Sequence
  source: /note="Description of Artificial Sequence: Synthetic peptide"
GYTFTYYDLH

SEQ ID NO: 2010 - protein, 10 aa, Artificial Sequence
  source: /note="Description of Artificial Sequence: Synthetic peptide"
RIDPQSGGIK

SEQ ID NO: 2011 - protein, 9 aa, Artificial Sequence
  source: /note="Description of Artificial Sequence: Synthetic peptide"
WDYGGYFDV

SEQ ID NO: 2012 - protein, 12 aa, Artificial Sequence
  source: /note="Description of Artificial Sequence: Synthetic peptide"
RASQDIYNYLNW

SEQ ID NO: 2013 - protein, 7 aa, Artificial Sequence
  source: /note="Description of Artificial Sequence: Synthetic peptide"
YTSRLHS

SEQ ID NO: 2014 - protein, 10 aa, Artificial Sequence
  source: /note="Description of Artificial Sequence: Synthetic peptide"
QQGDDIPWTF

SEQ ID NO: 2015 - protein, 8 aa, Artificial Sequence
  source: /note="Description of Artificial Sequence: Synthetic peptide"
GYTFTYYD

SEQ ID NO: 2016 - protein, 8 aa, Artificial Sequence
  source: /note="Description of Artificial Sequence: Synthetic peptide"
IDPQSGGI

SEQ ID NO: 2017 - protein, 11 aa, Artificial Sequence
  source: /note="Description of Artificial Sequence: Synthetic peptide"
ARWDYGGYFDV

SEQ ID NO: 2018 - protein, 7 aa, Artificial Sequence
  source: /note="Description of Artificial Sequence: Synthetic peptide"
QDIYNYL

SEQ ID NO: 2019 - protein, 3 aa, Artificial Sequence
  source: /note="Description of Artificial Sequence: Synthetic peptide"
YTS

SEQ ID NO: 2020 - protein, 10 aa, Artificial Sequence
  source: /note="Description of Artificial Sequence: Synthetic peptide"
QQGDDIPWTF

SEQ ID NO: 2021 - protein, 5 aa, Artificial Sequence
  source: /note="Description of Artificial Sequence: Synthetic peptide"
KYDMH

SEQ ID NO: 2022 - protein, 17 aa, Artificial Sequence
  source: /note="Description of Artificial Sequence: Synthetic peptide"
RIDPQDGGFKYAQKFQG

SEQ ID NO: 2023 - protein, 9 aa, Artificial Sequence
  source: /note="Description of Artificial Sequence: Synthetic peptide"
WDYGGYFDV

SEQ ID NO: 2024 - protein, 11 aa, Artificial Sequence
  source: /note="Description of Artificial Sequence: Synthetic peptide"
RASQDIFNYLN

SEQ ID NO: 2025 - protein, 7 aa, Artificial Sequence
  source: /note="Description of Artificial Sequence: Synthetic peptide"
YTSYLHS

SEQ ID NO: 2026 - protein, 9 aa, Artificial Sequence
  source: /note="Description of Artificial Sequence: Synthetic peptide"
QQGDELPWT

SEQ ID NO: 2027 - protein, 7 aa, Artificial Sequence
  source: /note="Description of Artificial Sequence: Synthetic peptide"
GYTFTKY

SEQ ID NO: 2028 - protein, 6 aa, Artificial Sequence
  source: /note="Description of Artificial Sequence: Synthetic peptide"
DPQDGG

SEQ ID NO: 2029 - protein, 9 aa, Artificial Sequence
  source: /note="Description of Artificial Sequence: Synthetic peptide"
WDYGGYFDV

SEQ ID NO: 2030 - protein, 11 aa, Artificial Sequence
  source: /note="Description of Artificial Sequence: Synthetic peptide"
RASQDIFNYLN

SEQ ID NO: 2031 - protein, 7 aa, Artificial Sequence
  source: /note="Description of Artificial Sequence: Synthetic peptide"
YTSYLHS

SEQ ID NO: 2032 - protein, 9 aa, Artificial Sequence
  source: /note="Description of Artificial Sequence: Synthetic peptide"
QQGDELPWT

SEQ ID NO: 2033 - protein, 10 aa, Artificial Sequence
  source: /note="Description of Artificial Sequence: Synthetic peptide"
GYTFTKYDMH

SEQ ID NO: 2034 - protein, 10 aa, Artificial Sequence
  source: /note="Description of Artificial Sequence: Synthetic peptide"
RIDPQDGGFK

SEQ ID NO: 2035 - protein, 9 aa, Artificial Sequence
  source: /note="Description of Artificial Sequence: Synthetic peptide"
WDYGGYFDV

SEQ ID NO: 2036 - protein, 11 aa, Artificial Sequence
  source: /note="Description of Artificial Sequence: Synthetic peptide"
RASQDIFNYLN

SEQ ID NO: 2037 - protein, 7 aa, Artificial Sequence
  source: /note="Description of Artificial Sequence: Synthetic peptide"
YTSYLHS

SEQ ID NO: 2038 - protein, 9 aa, Artificial Sequence
  source: /note="Description of Artificial Sequence: Synthetic peptide"
QQGDELPWT

SEQ ID NO: 2039 - protein, 8 aa, Artificial Sequence
  source: /note="Description of Artificial Sequence: Synthetic peptide"
GYTFTKYD

SEQ ID NO: 2040 - protein, 8 aa, Artificial Sequence
  source: /note="Description of Artificial Sequence: Synthetic peptide"
IDPQDGGF

SEQ ID NO: 2041 - protein, 11 aa, Artificial Sequence
  source: /note="Description of Artificial Sequence: Synthetic peptide"
ARWDYGGYFDV

SEQ ID NO: 2042 - protein, 6 aa, Artificial Sequence
  source: /note="Description of Artificial Sequence: Synthetic peptide"
QDIFNY

SEQ ID NO: 2043 - protein, 3 aa, Artificial Sequence
  source: /note="Description of Artificial Sequence: Synthetic peptide"
YTS

SEQ ID NO: 2044 - protein, 9 aa, Artificial Sequence
  source: /note="Description of Artificial Sequence: Synthetic peptide"
QQGDELPWT

SEQ ID NO: 2045 - protein, 5 aa, Artificial Sequence
  source: /note="Description of Artificial Sequence: Synthetic peptide"
YYDMH

SEQ ID NO: 2046 - protein, 17 aa, Artificial Sequence
  source: /note="Description of Artificial Sequence: Synthetic peptide"
RIDPYDGDIKYAQKFQG

SEQ ID NO: 2047 - protein, 9 aa, Artificial Sequence
  source: /note="Description of Artificial Sequence: Synthetic peptide"
WDYGGYFDV

SEQ ID NO: 2048 - protein, 11 aa, Artificial Sequence
  source: /note="Description of Artificial Sequence: Synthetic peptide"
RASQDIYNYLN

SEQ ID NO: 2049 - protein, 7 aa, Artificial Sequence
  source: /note="Description of Artificial Sequence: Synthetic peptide"
YTSLLHS

SEQ ID NO: 2050 - protein, 9 aa, Artificial Sequence
  source: /note="Description of Artificial Sequence: Synthetic peptide"
QQGDELPWT

SEQ ID NO: 2051 - protein, 7 aa, Artificial Sequence
  source: /note="Description of Artificial Sequence: Synthetic peptide"
GYTFTYY

SEQ ID NO: 2052 - protein, 6 aa, Artificial Sequence
  source: /note="Description of Artificial Sequence: Synthetic peptide"
DPYDGD

SEQ ID NO: 2053 - protein, 9 aa, Artificial Sequence
  source: /note="Description of Artificial Sequence: Synthetic peptide"
WDYGGYFDV

SEQ ID NO: 2054 - protein, 11 aa, Artificial Sequence
  source: /note="Description of Artificial Sequence: Synthetic peptide"
RASQDIYNYLN

SEQ ID NO: 2055 - protein, 7 aa, Artificial Sequence
  source: /note="Description of Artificial Sequence: Synthetic peptide"
YTSLLHS

SEQ ID NO: 2056 - protein, 9 aa, Artificial Sequence
  source: /note="Description of Artificial Sequence: Synthetic peptide"
QQGDELPWT

SEQ ID NO: 2057 - protein, 10 aa, Artificial Sequence
  source: /note="Description of Artificial Sequence: Synthetic peptide"
GYTFTYYDMH

SEQ ID NO: 2058 - protein, 10 aa, Artificial Sequence
  source: /note="Description of Artificial Sequence: Synthetic peptide"
RIDPYDGDIK

SEQ ID NO: 2059 - protein, 9 aa, Artificial Sequence
  source: /note="Description of Artificial Sequence: Synthetic peptide"
WDYGGYFDV

SEQ ID NO: 2060 - protein, 11 aa, Artificial Sequence
  source: /note="Description of Artificial Sequence: Synthetic peptide"
RASQDIYNYLN

SEQ ID NO: 2061 - protein, 7 aa, Artificial Sequence
  source: /note="Description of Artificial Sequence: Synthetic peptide"
YTSLLHS

SEQ ID NO: 2062 - protein, 9 aa, Artificial Sequence
  source: /note="Description of Artificial Sequence: Synthetic peptide"
QQGDELPWT

SEQ ID NO: 2063 - protein, 8 aa, Artificial Sequence
  source: /note="Description of Artificial Sequence: Synthetic peptide"
GYTFTYYD

SEQ ID NO: 2064 - protein, 8 aa, Artificial Sequence
  source: /note="Description of Artificial Sequence: Synthetic peptide"
IDPYDGDI

SEQ ID NO: 2065 - protein, 11 aa, Artificial Sequence
  source: /note="Description of Artificial Sequence: Synthetic peptide"
ARWDYGGYFDV

SEQ ID NO: 2066 - protein, 6 aa, Artificial Sequence
  source: /note="Description of Artificial Sequence: Synthetic peptide"
QDIYNY

SEQ ID NO: 2067 - protein, 3 aa, Artificial Sequence
  source: /note="Description of Artificial Sequence: Synthetic peptide"
YTS

SEQ ID NO: 2068 - protein, 9 aa, Artificial Sequence
  source: /note="Description of Artificial Sequence: Synthetic peptide"
QQGDELPWT

SEQ ID NO: 2069 - protein, 5 aa, Artificial Sequence
  source: /note="Description of Artificial Sequence: Synthetic peptide"
SYDMH

SEQ ID NO: 2070 - protein, 17 aa, Artificial Sequence
  source: /note="Description of Artificial Sequence: Synthetic peptide"
RIDPQSGGVKYAQKFQG

SEQ ID NO: 2071 - protein, 9 aa, Artificial Sequence
  source: /note="Description of Artificial Sequence: Synthetic peptide"
WDYGGYFDV

SEQ ID NO: 2072 - protein, 11 aa, Artificial Sequence
  source: /note="Description of Artificial Sequence: Synthetic peptide"
RASQDIYNYLN

SEQ ID NO: 2073 - protein, 7 aa, Artificial Sequence
  source: /note="Description of Artificial Sequence: Synthetic peptide"
YTSVLHS

SEQ ID NO: 2074 - protein, 10 aa, Artificial Sequence
  source: /note="Description of Artificial Sequence: Synthetic peptide"
QQGDELPWTF

SEQ ID NO: 2075 - protein, 7 aa, Artificial Sequence
  source: /note="Description of Artificial Sequence: Synthetic peptide"
GYTFTSY

SEQ ID NO: 2076 - protein, 6 aa, Artificial Sequence
  source: /note="Description of Artificial Sequence: Synthetic peptide"
DPQSGG

SEQ ID NO: 2077 - protein, 9 aa, Artificial Sequence
  source: /note="Description of Artificial Sequence: Synthetic peptide"
WDYGGYFDV

SEQ ID NO: 2078 - protein, 11 aa, Artificial Sequence
  source: /note="Description of Artificial Sequence: Synthetic peptide"
RASQDIYNYLN

SEQ ID NO: 2079 - protein, 7 aa, Artificial Sequence
  source: /note="Description of Artificial Sequence: Synthetic peptide"
YTSVLHS

SEQ ID NO: 2080 - protein, 10 aa, Artificial Sequence
  source: /note="Description of Artificial Sequence: Synthetic peptide"
QQGDELPWTF

SEQ ID NO: 2081 - protein, 10 aa, Artificial Sequence
  source: /note="Description of Artificial Sequence: Synthetic peptide"
GYTFTSYDMH

SEQ ID NO: 2082 - protein, 10 aa, Artificial Sequence
  source: /note="Description of Artificial Sequence: Synthetic peptide"
RIDPQSGGVK

SEQ ID NO: 2083 - protein, 9 aa, Artificial Sequence
  source: /note="Description of Artificial Sequence: Synthetic peptide"
WDYGGYFDV

SEQ ID NO: 2084 - protein, 11 aa, Artificial Sequence
  source: /note="Description of Artificial Sequence: Synthetic peptide"
RASQDIYNYLN

SEQ ID NO: 2085 - protein, 7 aa, Artificial Sequence
  source: /note="Description of Artificial Sequence: Synthetic peptide"
YTSVLHS

SEQ ID NO: 2086 - protein, 10 aa, Artificial Sequence
  source: /note="Description of Artificial Sequence: Synthetic peptide"
QQGDELPWTF

SEQ ID NO: 2087 - protein, 8 aa, Artificial Sequence
  source: /note="Description of Artificial Sequence: Synthetic peptide"
GYTFTSYD

SEQ ID NO: 2088 - protein, 8 aa, Artificial Sequence
  source: /note="Description of Artificial Sequence: Synthetic peptide"
IDPQSGGV

SEQ ID NO: 2089 - protein, 11 aa, Artificial Sequence
  source: /note="Description of Artificial Sequence: Synthetic peptide"
ARWDYGGYFDV

SEQ ID NO: 2090 - protein, 6 aa, Artificial Sequence
  source: /note="Description of Artificial Sequence: Synthetic peptide"
QDIYNY

SEQ ID NO: 2091 - protein, 3 aa, Artificial Sequence
  source: /note="Description of Artificial Sequence: Synthetic peptide"
YTS

SEQ ID NO: 2092 - protein, 10 aa, Artificial Sequence
  source: /note="Description of Artificial Sequence: Synthetic peptide"
QQGDELPWTF

SEQ ID NO: 2093 - protein, 5 aa, Artificial Sequence
  source: /note="Description of Artificial Sequence: Synthetic peptide"
SYDMH

SEQ ID NO: 2094 - protein, 17 aa, Artificial Sequence
  source: /note="Description of Artificial Sequence: Synthetic peptide"
RIDPQSGGIRYAQKFQG

SEQ ID NO: 2095 - protein, 9 aa, Artificial Sequence
  source: /note="Description of Artificial Sequence: Synthetic peptide"
WDYGGYFDV

SEQ ID NO: 2096 - protein, 11 aa, Artificial Sequence
  source: /note="Description of Artificial Sequence: Synthetic peptide"
RASQDIYNYLN

SEQ ID NO: 2097 - protein, 7 aa, Artificial Sequence
  source: /note="Description of Artificial Sequence: Synthetic peptide"
YTSNLHS

SEQ ID NO: 2098 - protein, 9 aa, Artificial Sequence
  source: /note="Description of Artificial Sequence: Synthetic peptide"
QQGDELPWT

SEQ ID NO: 2099 - protein, 7 aa, Artificial Sequence
  source: /note="Description of Artificial Sequence: Synthetic peptide"
GYTFTSY

SEQ ID NO: 2100 - protein, 6 aa, Artificial Sequence
  source: /note="Description of Artificial Sequence: Synthetic peptide"
DPQSGG

SEQ ID NO: 2101 - protein, 9 aa, Artificial Sequence
  source: /note="Description of Artificial Sequence: Synthetic peptide"
WDYGGYFDV

SEQ ID NO: 2102 - protein, 11 aa, Artificial Sequence
  source: /note="Description of Artificial Sequence: Synthetic peptide"
RASQDIYNYLN

SEQ ID NO: 2103 - protein, 7 aa, Artificial Sequence
  source: /note="Description of Artificial Sequence: Synthetic peptide"
YTSNLHS

SEQ ID NO: 2104 - protein, 9 aa, Artificial Sequence
  source: /note="Description of Artificial Sequence: Synthetic peptide"
QQGDELPWT

SEQ ID NO: 2105 - protein, 10 aa, Artificial Sequence
  source: /note="Description of Artificial Sequence: Synthetic peptide"
GYTFTSYDMH

SEQ ID NO: 2106 - protein, 10 aa, Artificial Sequence
  source: /note="Description of Artificial Sequence: Synthetic peptide"
RIDPQSGGIR

SEQ ID NO: 2107 - protein, 9 aa, Artificial Sequence
  source: /note="Description of Artificial Sequence: Synthetic peptide"
WDYGGYFDV

SEQ ID NO: 2108 - protein, 11 aa, Artificial Sequence
  source: /note="Description of Artificial Sequence: Synthetic peptide"
RASQDIYNYLN

SEQ ID NO: 2109 - protein, 7 aa, Artificial Sequence
  source: /note="Description of Artificial Sequence: Synthetic peptide"
YTSNLHS

SEQ ID NO: 2110 - protein, 9 aa, Artificial Sequence
  source: /note="Description of Artificial Sequence: Synthetic peptide"
QQGDELPWT

SEQ ID NO: 2111 - protein, 8 aa, Artificial Sequence
  source: /note="Description of Artificial Sequence: Synthetic peptide"
GYTFTSYD

SEQ ID NO: 2112 - protein, 8 aa, Artificial Sequence
  source: /note="Description of Artificial Sequence: Synthetic peptide"
IDPQSGGI

SEQ ID NO: 2113 - protein, 11 aa, Artificial Sequence
  source: /note="Description of Artificial Sequence: Synthetic peptide"
ARWDYGGYFDV

SEQ ID NO: 2114 - protein, 6 aa, Artificial Sequence
  source: /note="Description of Artificial Sequence: Synthetic peptide"
QDIYNY

SEQ ID NO: 2115 - protein, 3 aa, Artificial Sequence
  source: /note="Description of Artificial Sequence: Synthetic peptide"
YTS

SEQ ID NO: 2116 - protein, 9 aa, Artificial Sequence
  source: /note="Description of Artificial Sequence: Synthetic peptide"
QQGDELPWT

SEQ ID NO: 2117 - protein, 5 aa, Artificial Sequence
  source: /note="Description of Artificial Sequence: Synthetic peptide"
SYDMH

SEQ ID NO: 2118 - protein, 17 aa, Artificial Sequence
  source: /note="Description of Artificial Sequence: Synthetic peptide"
RIDPQDGDVKYAQKFQG

SEQ ID NO: 2119 - protein, 9 aa, Artificial Sequence
  source: /note="Description of Artificial Sequence: Synthetic peptide"
WDYGGYFDV

SEQ ID NO: 2120 - protein, 11 aa, Artificial Sequence
  source: /note="Description of Artificial Sequence: Synthetic peptide"
RASQDIYNYLN

SEQ ID NO: 2121 - protein, 7 aa, Artificial Sequence
  source: /note="Description of Artificial Sequence: Synthetic peptide"
YTSGLHS

SEQ ID NO: 2122 - protein, 9 aa, Artificial Sequence
  source: /note="Description of Artificial Sequence: Synthetic peptide"
QQGDELPWT

SEQ ID NO: 2123 - protein, 7 aa, Artificial Sequence
  source: /note="Description of Artificial Sequence: Synthetic peptide"
GYTFTSY

SEQ ID NO: 2124 - protein, 6 aa, Artificial Sequence
  source: /note="Description of Artificial Sequence: Synthetic peptide"
DPQDGD

SEQ ID NO: 2125 - protein, 9 aa, Artificial Sequence
  source: /note="Description of Artificial Sequence: Synthetic peptide"
WDYGGYFDV

SEQ ID NO: 2126 - protein, 11 aa, Artificial Sequence
  source: /note="Description of Artificial Sequence: Synthetic peptide"
RASQDIYNYLN

SEQ ID NO: 2127 - protein, 7 aa, Artificial Sequence
  source: /note="Description of Artificial Sequence: Synthetic peptide"
YTSGLHS

SEQ ID NO: 2128 - protein, 9 aa, Artificial Sequence
  source: /note="Description of Artificial Sequence: Synthetic peptide"
QQGDELPWT

SEQ ID NO: 2129 - protein, 10 aa, Artificial Sequence
  source: /note="Description of Artificial Sequence: Synthetic peptide"
GYTFTSYDMH

SEQ ID NO: 2130 - protein, 10 aa, Artificial Sequence
  source: /note="Description of Artificial Sequence: Synthetic peptide"
RIDPQDGDVK

SEQ ID NO: 2131 - protein, 9 aa, Artificial Sequence
  source: /note="Description of Artificial Sequence: Synthetic peptide"
WDYGGYFDV

SEQ ID NO: 2132 - protein, 11 aa, Artificial Sequence
  source: /note="Description of Artificial Sequence: Synthetic peptide"
RASQDIYNYLN

SEQ ID NO: 2133 - protein, 7 aa, Artificial Sequence
  source: /note="Description of Artificial Sequence: Synthetic peptide"
YTSGLHS

SEQ ID NO: 2134 - protein, 9 aa, Artificial Sequence
  source: /note="Description of Artificial Sequence: Synthetic peptide"
QQGDELPWT

SEQ ID NO: 2135 - protein, 8 aa, Artificial Sequence
  source: /note="Description of Artificial Sequence: Synthetic peptide"
GYTFTSYD

SEQ ID NO: 2136 - protein, 8 aa, Artificial Sequence
  source: /note="Description of Artificial Sequence: Synthetic peptide"
IDPQDGDV

SEQ ID NO: 2137 - protein, 11 aa, Artificial Sequence
  source: /note="Description of Artificial Sequence: Synthetic peptide"
ARWDYGGYFDV

SEQ ID NO: 2138 - protein, 6 aa, Artificial Sequence
  source: /note="Description of Artificial Sequence: Synthetic peptide"
QDIYNY

SEQ ID NO: 2139 - protein, 3 aa, Artificial Sequence
  source: /note="Description of Artificial Sequence: Synthetic peptide"
YTS

SEQ ID NO: 2140 - protein, 9 aa, Artificial Sequence
  source: /note="Description of Artificial Sequence: Synthetic peptide"
QQGDELPWT

SEQ ID NO: 2141 - protein, 5 aa, Artificial Sequence
  source: /note="Description of Artificial Sequence: Synthetic peptide"
SYDMH

SEQ ID NO: 2142 - protein, 17 aa, Artificial Sequence
  source: /note="Description of Artificial Sequence: Synthetic peptide"
RIDPQSGGIRYAQKFQG

SEQ ID NO: 2143 - protein, 9 aa, Artificial Sequence
  source: /note="Description of Artificial Sequence: Synthetic peptide"
WDYGGQFDV

SEQ ID NO: 2144 - protein, 11 aa, Artificial Sequence
  source: /note="Description of Artificial Sequence: Synthetic peptide"
RASQDIYNYLN

SEQ ID NO: 2145 - protein, 7 aa, Artificial Sequence
  source: /note="Description of Artificial Sequence: Synthetic peptide"
YTSILHS

SEQ ID NO: 2146 - protein, 9 aa, Artificial Sequence
  source: /note="Description of Artificial Sequence: Synthetic peptide"
QQGDTLPWT

SEQ ID NO: 2147 - protein, 7 aa, Artificial Sequence
  source: /note="Description of Artificial Sequence: Synthetic peptide"
GYTFTSY

SEQ ID NO: 2148 - protein, 6 aa, Artificial Sequence
  source: /note="Description of Artificial Sequence: Synthetic peptide"
DPQSGG

SEQ ID NO: 2149 - protein, 9 aa, Artificial Sequence
  source: /note="Description of Artificial Sequence: Synthetic peptide"
WDYGGQFDV

SEQ ID NO: 2150 - protein, 11 aa, Artificial Sequence
  source: /note="Description of Artificial Sequence: Synthetic peptide"
RASQDIYNYLN

SEQ ID NO: 2151 - protein, 7 aa, Artificial Sequence
  source: /note="Description of Artificial Sequence: Synthetic peptide"
YTSILHS

SEQ ID NO: 2152 - protein, 9 aa, Artificial Sequence
  source: /note="Description of Artificial Sequence: Synthetic peptide"
QQGDTLPWT

SEQ ID NO: 2153 - protein, 10 aa, Artificial Sequence
  source: /note="Description of Artificial Sequence: Synthetic peptide"
GYTFTSYDMH

SEQ ID NO: 2154 - protein, 10 aa, Artificial Sequence
  source: /note="Description of Artificial Sequence: Synthetic peptide"
RIDPQSGGIR

SEQ ID NO: 2155 - protein, 9 aa, Artificial Sequence
  source: /note="Description of Artificial Sequence: Synthetic peptide"
WDYGGQFDV

SEQ ID NO: 2156 - protein, 11 aa, Artificial Sequence
  source: /note="Description of Artificial Sequence: Synthetic peptide"
RASQDIYNYLN

SEQ ID NO: 2157 - protein, 7 aa, Artificial Sequence
  source: /note="Description of Artificial Sequence: Synthetic peptide"
YTSILHS

SEQ ID NO: 2158 - protein, 9 aa, Artificial Sequence
  source: /note="Description of Artificial Sequence: Synthetic peptide"
QQGDTLPWT

SEQ ID NO: 2159 - protein, 8 aa, Artificial Sequence
  source: /note="Description of Artificial Sequence: Synthetic peptide"
GYTFTSYD

SEQ ID NO: 2160 - protein, 8 aa, Artificial Sequence
  source: /note="Description of Artificial Sequence: Synthetic peptide"
IDPQSGGI

SEQ ID NO: 2161 - protein, 11 aa, Artificial Sequence
  source: /note="Description of Artificial Sequence: Synthetic peptide"
ARWDYGGQFDV

SEQ ID NO: 2162 - protein, 6 aa, Artificial Sequence
  source: /note="Description of Artificial Sequence: Synthetic peptide"
QDIYNY

SEQ ID NO: 2163 - protein, 3 aa, Artificial Sequence
  source: /note="Description of Artificial Sequence: Synthetic peptide"
YTS

SEQ ID NO: 2164 - protein, 9 aa, Artificial Sequence
  source: /note="Description of Artificial Sequence: Synthetic peptide"
QQGDTLPWT

SEQ ID NO: 2165 - protein, 5 aa, Artificial Sequence
  source: /note="Description of Artificial Sequence: Synthetic peptide"
EYDMH

SEQ ID NO: 2166 - protein, 17 aa, Artificial Sequence
  source: /note="Description of Artificial Sequence: Synthetic peptide"
RIDPQSGGIRYAQKFQG

SEQ ID NO: 2167 - protein, 9 aa, Artificial Sequence
  source: /note="Description of Artificial Sequence: Synthetic peptide"
WDYGGQFDA

SEQ ID NO: 2168 - protein, 11 aa, Artificial Sequence
  source: /note="Description of Artificial Sequence: Synthetic peptide"
RASQDIYNYLN

SEQ ID NO: 2169 - protein, 7 aa, Artificial Sequence
  source: /note="Description of Artificial Sequence: Synthetic peptide"
YTSVLHS

SEQ ID NO: 2170 - protein, 9 aa, Artificial Sequence
  source: /note="Description of Artificial Sequence: Synthetic peptide"
QQGDTLPWT

SEQ ID NO: 2171 - protein, 7 aa, Artificial Sequence
  source: /note="Description of Artificial Sequence: Synthetic peptide"
GYTFTEY

SEQ ID NO: 2172 - protein, 6 aa, Artificial Sequence
  source: /note="Description of Artificial Sequence: Synthetic peptide"
DPQSGG

SEQ ID NO: 2173 - protein, 9 aa, Artificial Sequence
  source: /note="Description of Artificial Sequence: Synthetic peptide"
WDYGGQFDA

SEQ ID NO: 2174 - protein, 11 aa, Artificial Sequence
  source: /note="Description of Artificial Sequence: Synthetic peptide"
RASQDIYNYLN

SEQ ID NO: 2175 - protein, 7 aa, Artificial Sequence
  source: /note="Description of Artificial Sequence: Synthetic peptide"
YTSVLHS

SEQ ID NO: 2176 - protein, 9 aa, Artificial Sequence
  source: /note="Description of Artificial Sequence: Synthetic peptide"
QQGDTLPWT

SEQ ID NO: 2177 - protein, 10 aa, Artificial Sequence
  source: /note="Description of Artificial Sequence: Synthetic peptide"
GYTFTEYDMH

SEQ ID NO: 2178 - protein, 10 aa, Artificial Sequence
  source: /note="Description of Artificial Sequence: Synthetic peptide"
RIDPQSGGIR

SEQ ID NO: 2179 - protein, 9 aa, Artificial Sequence
  source: /note="Description of Artificial Sequence: Synthetic peptide"
WDYGGQFDA

SEQ ID NO: 2180 - protein, 11 aa, Artificial Sequence
  source: /note="Description of Artificial Sequence: Synthetic peptide"
RASQDIYNYLN

SEQ ID NO: 2181 - protein, 7 aa, Artificial Sequence
  source: /note="Description of Artificial Sequence: Synthetic peptide"
YTSVLHS

SEQ ID NO: 2182 - protein, 9 aa, Artificial Sequence
  source: /note="Description of Artificial Sequence: Synthetic peptide"
QQGDTLPWT

SEQ ID NO: 2183 - protein, 8 aa, Artificial Sequence
  source: /note="Description of Artificial Sequence: Synthetic peptide"
GYTFTEYD

SEQ ID NO: 2184 - protein, 8 aa, Artificial Sequence
  source: /note="Description of Artificial Sequence: Synthetic peptide"
IDPQSGGI

SEQ ID NO: 2185 - protein, 11 aa, Artificial Sequence
  source: /note="Description of Artificial Sequence: Synthetic peptide"
ARWDYGGQFDA

SEQ ID NO: 2186 - protein, 6 aa, Artificial Sequence
  source: /note="Description of Artificial Sequence: Synthetic peptide"
QDIYNY

SEQ ID NO: 2187 - protein, 3 aa, Artificial Sequence
  source: /note="Description of Artificial Sequence: Synthetic peptide"
YTS

SEQ ID NO: 2188 - protein, 9 aa, Artificial Sequence
  source: /note="Description of Artificial Sequence: Synthetic peptide"
QQGDTLPWT

SEQ ID NO: 2189 - protein, 5 aa, Artificial Sequence
  source: /note="Description of Artificial Sequence: Synthetic peptide"
SYYMN

SEQ ID NO: 2190 - protein, 17 aa, Artificial Sequence
  source: /note="Description of Artificial Sequence: Synthetic peptide"
RIDPQSGGVKYAQKFQG

SEQ ID NO: 2191 - protein, 9 aa, Artificial Sequence
  source: /note="Description of Artificial Sequence: Synthetic peptide"
WHYGGQFDV

SEQ ID NO: 2192 - protein, 11 aa, Artificial Sequence
  source: /note="Description of Artificial Sequence: Synthetic peptide"
RASQDIYNYLN

SEQ ID NO: 2193 - protein, 7 aa, Artificial Sequence
  source: /note="Description of Artificial Sequence: Synthetic peptide"
YTSGLHS

SEQ ID NO: 2194 - protein, 9 aa, Artificial Sequence
  source: /note="Description of Artificial Sequence: Synthetic peptide"
QQGDTLPWT

SEQ ID NO: 2195 - protein, 7 aa, Artificial Sequence
  source: /note="Description of Artificial Sequence: Synthetic peptide"
GYTFTSY

SEQ ID NO: 2196 - protein, 8 aa, Artificial Sequence
  source: /note="Description of Artificial Sequence: Synthetic peptide"
IDPQSGGV

SEQ ID NO: 2197 - protein, 9 aa, Artificial Sequence
  source: /note="Description of Artificial Sequence: Synthetic peptide"
WHYGGQFDV

SEQ ID NO: 2198 - protein, 11 aa, Artificial Sequence
  source: /note="Description of Artificial Sequence: Synthetic peptide"
RASQDIYNYLN

SEQ ID NO: 2199 - protein, 7 aa, Artificial Sequence
  source: /note="Description of Artificial Sequence: Synthetic peptide"
YTSGLHS

SEQ ID NO: 2200 - protein, 9 aa, Artificial Sequence
  source: /note="Description of Artificial Sequence: Synthetic peptide"
QQGDTLPWT

SEQ ID NO: 2201 - protein, 10 aa, Artificial Sequence
  source: /note="Description of Artificial Sequence: Synthetic peptide"
GYTFTSYYMN

SEQ ID NO: 2202 - protein, 10 aa, Artificial Sequence
  source: /note="Description of Artificial Sequence: Synthetic peptide"
RIDPQSGGVK

SEQ ID NO: 2203 - protein, 9 aa, Artificial Sequence
  source: /note="Description of Artificial Sequence: Synthetic peptide"
WHYGGQFDV

SEQ ID NO: 2204 - protein, 11 aa, Artificial Sequence
  source: /note="Description of Artificial Sequence: Synthetic peptide"
RASQDIYNYLN

SEQ ID NO: 2205 - protein, 7 aa, Artificial Sequence
  source: /note="Description of Artificial Sequence: Synthetic peptide"
YTSGLHS

SEQ ID NO: 2206 - protein, 9 aa, Artificial Sequence
  source: /note="Description of Artificial Sequence: Synthetic peptide"
QQGDTLPWT

SEQ ID NO: 2207 - protein, 8 aa, Artificial Sequence
  source: /note="Description of Artificial Sequence: Synthetic peptide"
GYTFTSYY

SEQ ID NO: 2208 - protein, 8 aa, Artificial Sequence
  source: /note="Description of Artificial Sequence: Synthetic peptide"
IDPQSGGV

SEQ ID NO: 2209 - protein, 11 aa, Artificial Sequence
  source: /note="Description of Artificial Sequence: Synthetic peptide"
ARWHYGGQFDV

SEQ ID NO: 2210 - protein, 6 aa, Artificial Sequence
  source: /note="Description of Artificial Sequence: Synthetic peptide"
QDIYNY

SEQ ID NO: 2211 - protein, 3 aa, Artificial Sequence
  source: /note="Description of Artificial Sequence: Synthetic peptide"
YTS

SEQ ID NO: 2212 - protein, 9 aa, Artificial Sequence
  source: /note="Description of Artificial Sequence: Synthetic peptide"
QQGDTLPWT

SEQ ID NO: 2213 - protein, 447 aa, Artificial Sequence
  source: /note="Description of Artificial Sequence: Synthetic polypeptide"
QVQLVQSGVEVKKPGASVKVSCKASGYTFTNYYMYWVRQAPGQGLEWMGGINPSNGGTNFNEKFKNRVTLTTDSSTTTAYMELKSLQFDDTAVYYCARRDYRFDMGFDYWGQGTTVTVSSASTKGPSVFPLAPCSRSTSESTAALGCLVKDYFPEPVTVSWNSGALTSGVHTFPAVLQSSGLYSLSSVVTVPSSSLGTKTYTCNVDHKPSNTKVDKRVESKYGPPCPPCPAPEFLGGPSVFLFPPKPKDTLMISRTPEVTCVVVDVSQEDPEVQFNWYVDGVEVHNAKTKPREEQFNSTYRVVSVLTVLHQDWLNGKEYKCKVSNKGLPSSIEKTISKAKGQPREPQVYTLPPSQEEMTKNQVSLTCLVKGFYPSDIAVEWESNGQPENNYKTTPPVLDSDGSFFLYSRLTVDKSRWQEGNVFSCSVMHEALHNHYTQKSLSLSLGK

SEQ ID NO: 2214 - protein, 218 aa, Artificial Sequence
  source: /note="Description of Artificial Sequence: Synthetic polypeptide"
EIVLTQSPATLSLSPGERATLSCRASKGVSTSGYSYLHWYQQKPGQAPRLLIYLASYLESGVPARFSGSGSGTDFTLTISSLEPEDFAVYYCQHSRDLPLTFGGGTKVEIKRTVAAPSVFIFPPSDEQLKSGTASVVCLLNNFYPREAKVQWKVDNALQSGNSQESVTEQDSKDSTYSLSSTLTLSKADYEKHKVYACEVTHQGLSSPVTKSFNRGEC

SEQ ID NO: 2215 - protein, 440 aa, Artificial Sequence
  source: /note="Description of Artificial Sequence: Synthetic polypeptide"
QVQLVESGGGVVQPGRSLRLDCKASGITFSNSGMHWVRQAPGKGLEWVAVIWYDGSKRYYADSVKGRFTISRDNSKNTLFLQMNSLRAEDTAVYYCATNDDYWGQGTLVTVSSASTKGPSVFPLAPCSRSTSESTAALGCLVKDYFPEPVTVSWNSGALTSGVHTFPAVLQSSGLYSLSSVVTVPSSSLGTKTYTCNVDHKPSNTKVDKRVESKYGPPCPPCPAPEFLGGPSVFLFPPKPKDTLMISRTPEVTCVVVDVSQEDPEVQFNWYVDGVEVHNAKTKPREEQFNSTYRVVSVLTVLHQDWLNGKEYKCKVSNKGLPSSIEKTISKAKGQPREPQVYTLPPSQEEMTKNQVSLTCLVKGFYPSDIAVEWESNGQPENNYKTTPPVLDSDGSFFLYSRLTVDKSRWQEGNVFSCSVMHEALHNHYTQKSLSLSLGK

SEQ ID NO: 2216 - protein, 214 aa, Artificial Sequence
  source: /note="Description of Artificial Sequence: Synthetic polypeptide"
EIVLTQSPATLSLSPGERATLSCRASQSVSSYLAWYQQKPGQAPRLLIYDASNRATGIPARFSGSGSGTDFTLTISSLEPEDFAVYYCQQSSNWPRTFGQGTKVEIKRTVAAPSVFIFPPSDEQLKSGTASVVCLLNNFYPREAKVQWKVDNALQSGNSQESVTEQDSKDSTYSLSSTLTLSKADYEKHKVYACEVTHQGLSSPVTKSFNRGEC

SEQ ID NO: 2217 - protein, 118 aa, Artificial Sequence; identical to SEQ ID NO: 922
  source: /note="Description of Artificial Sequence: Synthetic polypeptide"

SEQ ID NO: 2218 - protein, 5 aa, Artificial Sequence
  source: /note="Description of Artificial Sequence: Synthetic peptide"
  VARIANT (1)..(1): /replace="R" or "N" or "Y" or "T" or "Q" or "K" or "H" or "G" or "A"
  VARIANT (3)..(3): /replace="L" or "W" or "Y" or "F"
  VARIANT (4)..(4): /replace="L" or "I" or "V" or "T"
  VARIANT (5)..(5): /replace="Q" or "N" or "S" or "A" or "T"
  SITE (1)..(5): /note="Variant residues given in the sequence have no preference with respect to those in the annotations for variant positions"
SYDMH

SEQ ID NO: 2219 - protein, 17 aa, Artificial Sequence
  source: /note="Description of Artificial Sequence: Synthetic peptide"
  VARIANT (5)..(5): /replace="E" or "D" or "L" or "P" or "V" or "Y" or "I" or "H" or "R"
  VARIANT (6)..(6): /replace="D" or "G" or "T" or "N" or "I" or "R"
  VARIANT (8)..(8): /replace="D" or "S" or "E"
  VARIANT (9)..(9): /replace="V" or "S" or "T" or "F" or "N" or "G" or "D" or "M"
  VARIANT (10)..(10): /replace="R" or "I" or "L"
  SITE (1)..(17): /note="Variant residues given in the sequence have no preference with respect to those in the annotations for variant positions"
RIDPQSGGIKYAQKFQG

SEQ ID NO: 2220 - protein, 9 aa, Artificial Sequence
  source: /note="Description of Artificial Sequence: Synthetic peptide"
  VARIANT (1)..(1): /replace="Y"
  VARIANT (2)..(2): /replace="H"
  VARIANT (3)..(3): /replace="H" or "W" or "F"
  VARIANT (6)..(6): /replace="Q" or "F"
  SITE (1)..(9): /note="Variant residues given in the sequence have no preference with respect to those in the annotations for variant positions"
WDYGGYFDV

SEQ ID NO: 2221 - protein, 107 aa, Artificial Sequence; identical to SEQ ID NO: 163
  source: /note="Description of Artificial Sequence: Synthetic polypeptide"

SEQ ID NO: 2222 - protein, 11 aa, Artificial Sequence
  source: /note="Description of Artificial Sequence: Synthetic peptide"
  VARIANT (7)..(7): /replace="W" or "F" or "T" or "A" or "S"
  VARIANT (8)..(8): /replace="H" or "S" or "K" or "Y"
  SITE (1)..(11): /note="Variant residues given in the sequence have no preference with respect to those in the annotations for variant positions"
RASQDIYNYLN

SEQ ID NO: 2223 - protein, 7 aa, Artificial Sequence
  source: /note="Description of Artificial Sequence: Synthetic peptide"
  VARIANT (2)..(2): /replace="S"
  VARIANT (4)..(4): /replace="G" or "I" or "M" or "V" or "S" or "N" or "L" or "H" or "E" or "Y" or "Q" or "K" or "A"
  VARIANT (6)..(6): /replace="E"
  VARIANT (7)..(7): /replace="T"
  SITE (1)..(7): /note="Variant residues given in the sequence have no preference with respect to those in the annotations for variant positions"
YTSRLHS

SEQ ID NO: 2224 - protein, 9 aa, Artificial Sequence
  source: /note="Description of Artificial Sequence: Synthetic peptide"
  VARIANT (5)..(5): /replace="E" or "A" or "I" or "S" or "M" or "L" or "G" or "N" or "D"
  VARIANT (6)..(6): /replace="I" or "V" or "Q"
  SITE (1)..(9): /note="Variant residues given in the sequence have no preference with respect to those in the annotations for variant positions"
QQGDTLPWT

SEQ ID NO: 2225 - protein, 330 aa, Artificial Sequence
  source: /note="Description of Artificial Sequence: Synthetic polypeptide"
ASTKGPSVFPLAPSSKSTSGGTAALGCLVKDYFPEPVTVSWNSGALTSGVHTFPAVLQSSGLYSLSSVVTVPSSSLGTQTYICNVNHKPSNTKVDKKVEPKSCDKTHTCPPCPAPEAAGGPSVFLFPPKPKDTLMISRTPEVTCVVVDVSHEDPEVKFNWYVDGVEVHNAKTKPREEQYNSTYRVVSVLTVLHQDWLNGKEYKCKVSNKALPAPIEKTISKAKGQPREPQVYTLPPSRDELTKNQVSLTCLVKGFYPSDIAVEWESNGQPENNYKTTPPVLDSDGSFFLYSKLTVDKSRWQQGNVFSCSVMHEALHNHYTQKSLSLSPGK

SEQ ID NO: 2226 - protein, 330 aa, Artificial Sequence
  source: /note="Description of Artificial Sequence: Synthetic polypeptide"
ASTKGPSVFPLAPSSKSTSGGTAALGCLVKDYFPEPVTVSWNSGALTSGVHTFPAVLQSSGLYSLSSVVTVPSSSLGTQTYICNVNHKPSNTKVDKKVEPKSCDKTHTCPPCPAPEAAGGPSVFLFPPKPKDTLMISRTPEVTCVVVSVSHEDPEVKFNWYVDGVEVHNAKTKPREEQYNSTYRVVSVLTVLHQDWLNGKEYKCKVSNKALPAPIEKTISKAKGQPREPQVYTLPPSRDELTKNQVSLTCLVKGFYPSDIAVEWESNGQPENNYKTTPPVLDSDGSFFLYSKLTVDKSRWQQGNVFSCSVMHEALHNHYTQKSLSLSPGK

SEQ ID NO: 2227 - protein, 118 aa, Artificial Sequence; identical to SEQ ID NO: 98
  source: /note="Description of Artificial Sequence: Synthetic polypeptide"

SEQ ID NO: 2228 - protein, 107 aa, Artificial Sequence; identical to SEQ ID NO: 333
  source: /note="Description of Artificial Sequence: Synthetic polypeptide"

SEQ ID NO: 2229 - protein, 5 aa, Artificial Sequence
  source: /note="Description of Artificial Sequence: Synthetic peptide"
SYDMH

SEQ ID NO: 2230 - protein, 17 aa, Artificial Sequence
  source: /note="Description of Artificial Sequence: Synthetic peptide"
RIDPQSGGIRYAQKFQG

SEQ ID NO: 2231 - protein, 9 aa, Artificial Sequence
  source: /note="Description of Artificial Sequence: Synthetic peptide"
WDYGGQFDV

SEQ ID NO: 2232 - protein, 11 aa, Artificial Sequence
  source: /note="Description of Artificial Sequence: Synthetic peptide"
RASQDIYNYLN

SEQ ID NO: 2233 - protein, 7 aa, Artificial Sequence
  source: /note="Description of Artificial Sequence: Synthetic peptide"
YTSILET

SEQ ID NO: 2234 - protein, 9 aa, Artificial Sequence
  source: /note="Description of Artificial Sequence: Synthetic peptide"
QQGDTLPWT

SEQ ID NO: 2235 - protein, 7 aa, Artificial Sequence
  source: /note="Description of Artificial Sequence: Synthetic peptide"
GYTFTSY

SEQ ID NO: 2236 - protein, 6 aa, Artificial Sequence
  source: /note="Description of Artificial Sequence: Synthetic peptide"
DPQSGG

SEQ ID NO: 2237 - protein, 9 aa, Artificial Sequence
  source: /note="Description of Artificial Sequence: Synthetic peptide"
WDYGGQFDV

SEQ ID NO: 2238 - protein, 11 aa, Artificial Sequence
  source: /note="Description of Artificial Sequence: Synthetic peptide"
RASQDIYNYLN

SEQ ID NO: 2239 - protein, 7 aa, Artificial Sequence
  source: /note="Description of Artificial Sequence: Synthetic peptide"
YTSILET

SEQ ID NO: 2240 - protein, 9 aa, Artificial Sequence
  source: /note="Description of Artificial Sequence: Synthetic peptide"
QQGDTLPWT

SEQ ID NO: 2241 - protein, 10 aa, Artificial Sequence
  source: /note="Description of Artificial Sequence: Synthetic peptide"
GYTFTSYDMH

SEQ ID NO: 2242 - protein, 10 aa, Artificial Sequence
  source: /note="Description of Artificial Sequence: Synthetic peptide"
RIDPQSGGIR

SEQ ID NO: 2243 - protein, 9 aa, Artificial Sequence
  source: /note="Description of Artificial Sequence: Synthetic peptide"
WDYGGQFDV

SEQ ID NO: 2244 - protein, 11 aa, Artificial Sequence
  source: /note="Description of Artificial Sequence: Synthetic peptide"
RASQDIYNYLN

SEQ ID NO: 2245 - protein, 7 aa, Artificial Sequence
  source: /note="Description of Artificial Sequence: Synthetic peptide"
YTSILET

SEQ ID NO: 2246 - protein, 9 aa, Artificial Sequence
  source: /note="Description of Artificial Sequence: Synthetic peptide"
QQGDTLPWT

SEQ ID NO: 2247 - protein, 8 aa, Artificial Sequence
  source: /note="Description of Artificial Sequence: Synthetic peptide"
GYTFTSYD

SEQ ID NO: 2248 - protein, 8 aa, Artificial Sequence
  source: /note="Description of Artificial Sequence: Synthetic peptide"
IDPQSGGI

SEQ ID NO: 2249 - protein, 11 aa, Artificial Sequence
  source: /note="Description of Artificial Sequence: Synthetic peptide"
ARWDYGGQFDV

SEQ ID NO: 2250 - protein, 6 aa, Artificial Sequence
  source: /note="Description of Artificial Sequence: Synthetic peptide"
QDIYNY

SEQ ID NO: 2251 - protein, 3 aa, Artificial Sequence
  source: /note="Description of Artificial Sequence: Synthetic peptide"
YTS

SEQ ID NO: 2252 - protein, 9 aa, Artificial Sequence
  source: /note="Description of Artificial Sequence: Synthetic peptide"
QQGDTLPWT

SEQ ID NO: 2253 - protein, 5 aa, Artificial Sequence
  source: /note="Description of Artificial Sequence: Synthetic peptide"
SYDIH

SEQ ID NO: 2254 - protein, 17 aa, Artificial Sequence
  source: /note="Description of Artificial Sequence: Synthetic peptide"
RIDPQSGGIRYAQKFQG

SEQ ID NO: 2255 - protein, 9 aa, Artificial Sequence
  source: /note="Description of Artificial Sequence: Synthetic peptide"
WDYGGYFDV

SEQ ID NO: 2256 - protein, 11 aa, Artificial Sequence
  source: /note="Description of Artificial Sequence: Synthetic peptide"
RASQDIYSYLN

SEQ ID NO: 2257 - protein, 7 aa, Artificial Sequence
  source: /note="Description of Artificial Sequence: Synthetic peptide"
YTSNLET

SEQ ID NO: 2258 - protein, 9 aa, Artificial Sequence
  source: /note="Description of Artificial Sequence: Synthetic peptide"
QQGDTLPWT

SEQ ID NO: 2259 - protein, 7 aa, Artificial Sequence
  source: /note="Description of Artificial Sequence: Synthetic peptide"
GYTFTSY

SEQ ID NO: 2260 - protein, 6 aa, Artificial Sequence
  source: /note="Description of Artificial Sequence: Synthetic peptide"
DPQSGG

SEQ ID NO: 2261 - protein, 9 aa, Artificial Sequence
  source: /note="Description of Artificial Sequence: Synthetic peptide"
WDYGGYFDV

SEQ ID NO: 2262 - protein, 11 aa, Artificial Sequence
  source: /note="Description of Artificial Sequence: Synthetic peptide"
RASQDIYSYLN

SEQ ID NO: 2263 - protein, 7 aa, Artificial Sequence
  source: /note="Description of Artificial Sequence: Synthetic peptide"
YTSNLET

SEQ ID NO: 2264 - protein, 9 aa, Artificial Sequence
  source: /note="Description of Artificial Sequence: Synthetic peptide"
QQGDTLPWT

SEQ ID NO: 2265 - protein, 10 aa, Artificial Sequence
  source: /note="Description of Artificial Sequence: Synthetic peptide"
GYTFTSYDMH

SEQ ID NO: 2266 - protein, 10 aa, Artificial Sequence
  source: /note="Description of Artificial Sequence: Synthetic peptide"
RIDPQSGGIR

SEQ ID NO: 2267 - protein, 9 aa, Artificial Sequence
  source: /note="Description of Artificial Sequence: Synthetic peptide"
WDYGGYFDV

SEQ ID NO: 2268 - protein, 11 aa, Artificial Sequence
  source: /note="Description of Artificial Sequence: Synthetic peptide"
RASQDIYSYLN

SEQ ID NO: 2269 - protein, 7 aa, Artificial Sequence
  source: /note="Description of Artificial Sequence: Synthetic peptide"
YTSNLET

SEQ ID NO: 2270 - protein, 9 aa, Artificial Sequence
  source: /note="Description of Artificial Sequence: Synthetic peptide"
QQGDTLPWT

SEQ ID NO: 2271 - protein, 8 aa, Artificial Sequence
  source: /note="Description of Artificial Sequence: Synthetic peptide"
GYTFTSYD

SEQ ID NO: 2272 - protein, 8 aa, Artificial Sequence
  source: /note="Description of Artificial Sequence: Synthetic peptide"
IDPQSGGI

SEQ ID NO: 2273 - protein, 11 aa, Artificial Sequence
  source: /note="Description of Artificial Sequence: Synthetic peptide"
ARWDYGGYFDV

SEQ ID NO: 2274 - protein, 6 aa, Artificial Sequence
  source: /note="Description of Artificial Sequence: Synthetic peptide"
QDIYSY

SEQ ID NO: 2275 - protein, 3 aa, Artificial Sequence
  source: /note="Description of Artificial Sequence: Synthetic peptide"
YTS

SEQ ID NO: 2276 - protein, 9 aa, Artificial Sequence
  source: /note="Description of Artificial Sequence: Synthetic peptide"
QQGDTLPWT

SEQ ID NO: 2277 - protein, 5 aa, Artificial Sequence
  source: /note="Description of Artificial Sequence: Synthetic peptide"
SYDMH

SEQ ID NO: 2278 - protein, 17 aa, Artificial Sequence
  source: /note="Description of Artificial Sequence: Synthetic peptide"
RIDPQSGGTKYAQKFQG

SEQ ID NO: 2279 - protein, 9 aa, Artificial Sequence
  source: /note="Description of Artificial Sequence: Synthetic peptide"
WDYGGQFDV

SEQ ID NO: 2280 - protein, 11 aa, Artificial Sequence
  source: /note="Description of Artificial Sequence: Synthetic peptide"
RASQDIYNYLN

SEQ ID NO: 2281 - protein, 7 aa, Artificial Sequence
  source: /note="Description of Artificial Sequence: Synthetic peptide"
YTSGLET

SEQ ID NO: 2282 - protein, 9 aa, Artificial Sequence
  source: /note="Description of Artificial Sequence: Synthetic peptide"
QQGDTLPWT

SEQ ID NO: 2283 - protein, 7 aa, Artificial Sequence
  source: /note="Description of Artificial Sequence: Synthetic peptide"
GYTFTSY

SEQ ID NO: 2284 - protein, 6 aa, Artificial Sequence
  source: /note="Description of Artificial Sequence: Synthetic peptide"
DPQSGG

SEQ ID NO: 2285 - protein, 9 aa, Artificial Sequence
  source: /note="Description of Artificial Sequence: Synthetic peptide"
WDYGGQFDV

SEQ ID NO: 2286 - protein, 11 aa, Artificial Sequence
  source: /note="Description of Artificial Sequence: Synthetic peptide"
RASQDIYNYLN

SEQ ID NO: 2287 - protein, 7 aa, Artificial Sequence
  source: /note="Description of Artificial Sequence: Synthetic peptide"
YTSGLET

SEQ ID NO: 2288 - protein, 9 aa, Artificial Sequence
  source: /note="Description of Artificial Sequence: Synthetic peptide"
QQGDTLPWT

SEQ ID NO: 2289 - protein, 10 aa, Artificial Sequence
  source: /note="Description of Artificial Sequence: Synthetic peptide"
GYTFTSYDMH

SEQ ID NO: 2290 - protein, 10 aa, Artificial Sequence
  source: /note="Description of Artificial Sequence: Synthetic peptide"
RIDPQSGGTK

SEQ ID NO: 2291 - protein, 9 aa, Artificial Sequence
  source: /note="Description of Artificial Sequence: Synthetic peptide"
WDYGGQFDV

SEQ ID NO: 2292 - protein, 11 aa, Artificial Sequence
  source: /note="Description of Artificial Sequence: Synthetic peptide"
RASQDIYNYLN

SEQ ID NO: 2293 - protein, 7 aa, Artificial Sequence
  source: /note="Description of Artificial Sequence: Synthetic peptide"
YTSGLET

SEQ ID NO: 2294 - protein, 9 aa, Artificial Sequence
  source: /note="Description of Artificial Sequence: Synthetic peptide"
QQGDTLPWT

SEQ ID NO: 2295 - protein, 8 aa, Artificial Sequence
  source: /note="Description of Artificial Sequence: Synthetic peptide"
GYTFTSYD

SEQ ID NO: 2296 - protein, 8 aa, Artificial Sequence
  source: /note="Description of Artificial Sequence: Synthetic peptide"
IDPQSGGT

SEQ ID NO: 2297 - protein, 11 aa, Artificial Sequence
  source: /note="Description of Artificial Sequence: Synthetic peptide"
ARWDYGGQFDV

SEQ ID NO: 2298 - protein, 6 aa, Artificial Sequence
  source: /note="Description of Artificial Sequence: Synthetic peptide"
QDIYNY

SEQ ID NO: 2299 - protein, 3 aa, Artificial Sequence
  source: /note="Description of Artificial Sequence: Synthetic peptide"
YTS

SEQ ID NO: 2300 - protein, 9 aa, Artificial Sequence
  source: /note="Description of Artificial Sequence: Synthetic peptide"
QQGDTLPWT

SEQ ID NO: 2301 - protein, 5 aa, Artificial Sequence
  source: /note="Description of Artificial Sequence: Synthetic peptide"
SYDMH

SEQ ID NO: 2302 - protein, 17 aa, Artificial Sequence
  source: /note="Description of Artificial Sequence: Synthetic peptide"
RIDPISGGIKYAQKFQG

SEQ ID NO: 2303 - protein, 9 aa, Artificial Sequence
  source: /note="Description of Artificial Sequence: Synthetic peptide"
WDYGGYFDV

SEQ ID NO: 2304 - protein, 11 aa, Artificial Sequence
  source: /note="Description of Artificial Sequence: Synthetic peptide"
RASQDIFNYLN

SEQ ID NO: 2305 - protein, 7 aa, Artificial Sequence
  source: /note="Description of Artificial Sequence: Synthetic peptide"
YTSHLET

SEQ ID NO: 2306 - protein, 9 aa, Artificial Sequence
  source: /note="Description of Artificial Sequence: Synthetic peptide"
QQGDTLPWT

SEQ ID NO: 2307 - protein, 7 aa, Artificial Sequence
  source: /note="Description of Artificial Sequence: Synthetic peptide"
GYTFTSY

SEQ ID NO: 2308 - protein, 6 aa, Artificial Sequence
  source: /note="Description of Artificial Sequence: Synthetic peptide"
DPISGG

SEQ ID NO: 2309 - protein, 9 aa, Artificial Sequence
  source: /note="Description of Artificial Sequence: Synthetic peptide"
WDYGGYFDV

SEQ ID NO: 2310 - protein, 11 aa, Artificial Sequence
  source: /note="Description of Artificial Sequence: Synthetic peptide"
RASQDIFNYLN

SEQ ID NO: 2311 - protein, 7 aa, Artificial Sequence
  source: /note="Description of Artificial Sequence: Synthetic peptide"
YTSHLET

SEQ ID NO: 2312 - protein, 9 aa, Artificial Sequence
  source: /note="Description of Artificial Sequence: Synthetic peptide"
QQGDTLPWT

SEQ ID NO: 2313 - protein, 10 aa, Artificial Sequence
  source: /note="Description of Artificial Sequence: Synthetic peptide"
GYTFTSYDMH

SEQ ID NO: 2314 - protein, 10 aa, Artificial Sequence
  source: /note="Description of Artificial Sequence: Synthetic peptide"
RIDPISGGIK

SEQ ID NO: 2315 - protein, 9 aa, Artificial Sequence
  source: /note="Description of Artificial Sequence: Synthetic peptide"
WDYGGYFDV

SEQ ID NO: 2316 - protein, 11 aa, Artificial Sequence
  source: /note="Description of Artificial Sequence: Synthetic peptide"
RASQDIFNYLN

SEQ ID NO: 2317 - protein, 7 aa, Artificial Sequence
  source: /note="Description of Artificial Sequence: Synthetic peptide"
YTSHLET

SEQ ID NO: 2318 - protein, 9 aa, Artificial Sequence
  source: /note="Description of Artificial Sequence: Synthetic peptide"
QQGDTLPWT

SEQ ID NO: 2319 - protein, 8 aa, Artificial Sequence
  source: /note="Description of Artificial Sequence: Synthetic peptide"
GYTFTSYD

SEQ ID NO: 2320 - protein, 8 aa, Artificial Sequence
  source: /note="Description of Artificial Sequence: Synthetic peptide"
IDPISGGI

SEQ ID NO: 2321 - protein, 11 aa, Artificial Sequence
  source: /note="Description of Artificial Sequence: Synthetic peptide"
ARWDYGGYFDV

SEQ ID NO: 2322 - protein, 6 aa, Artificial Sequence
  source: /note="Description of Artificial Sequence: Synthetic peptide"
QDIFNY

SEQ ID NO: 2323 - protein, 3 aa, Artificial Sequence
  source: /note="Description of Artificial Sequence: Synthetic peptide"
YTS

SEQ ID NO: 2324 - protein, 9 aa, Artificial Sequence
  source: /note="Description of Artificial Sequence: Synthetic peptide"
QQGDTLPWT

SEQ ID NO: 2325 - protein, 5 aa, Artificial Sequence
  source: /note="Description of Artificial Sequence: Synthetic peptide"
SYDMH

SEQ ID NO: 2326 - protein, 17 aa, Artificial Sequence
  source: /note="Description of Artificial Sequence: Synthetic peptide"
RIDPQSGGTKYAQKFQG

SEQ ID NO: 2327 - protein, 9 aa, Artificial Sequence
  source: /note="Description of Artificial Sequence: Synthetic peptide"
WDYGGYFDV

SEQ ID NO: 2328 - protein, 11 aa, Artificial Sequence
  source: /note="Description of Artificial Sequence: Synthetic peptide"
RASQDIYNYLN

SEQ ID NO: 2329 - protein, 7 aa, Artificial Sequence
  source: /note="Description of Artificial Sequence: Synthetic peptide"
YTSVLET

SEQ ID NO: 2330 - protein, 9 aa, Artificial Sequence
  source: /note="Description of Artificial Sequence: Synthetic peptide"
QQGDTLPWT

SEQ ID NO: 2331 - protein, 7 aa, Artificial Sequence
  source: /note="Description of Artificial Sequence: Synthetic peptide"
GYTFTSY

SEQ ID NO: 2332 - protein, 6 aa, Artificial Sequence
  source: /note="Description of Artificial Sequence: Synthetic peptide"
DPQSGG

SEQ ID NO: 2333 - protein, 9 aa, Artificial Sequence
  source: /note="Description of Artificial Sequence: Synthetic peptide"
WDYGGYFDV

SEQ ID NO: 2334 - protein, 11 aa, Artificial Sequence
  source: /note="Description of Artificial Sequence: Synthetic peptide"
RASQDIYNYLN

SEQ ID NO: 2335 - protein, 7 aa, Artificial Sequence
  source: /note="Description of Artificial Sequence: Synthetic peptide"
YTSVLET

SEQ ID NO: 2336 - protein, 9 aa, Artificial Sequence
  source: /note="Description of Artificial Sequence: Synthetic peptide"
QQGDTLPWT

SEQ ID NO: 2337 - protein, 10 aa, Artificial Sequence
  source: /note="Description of Artificial Sequence: Synthetic peptide"
GYTFTSYDMH

SEQ ID NO: 2338 - protein, 10 aa, Artificial Sequence
  source: /note="Description of Artificial Sequence: Synthetic peptide"
RIDPQSGGTK

SEQ ID NO: 2339 - protein, 8 aa, Artificial Sequence
  source: /note="Description of Artificial Sequence: Synthetic peptide"
DYGGYFDV

SEQ ID NO: 2340 - protein, 11 aa, Artificial Sequence
  source: /note="Description of Artificial Sequence: Synthetic peptide"
RASQDIYNYLN

SEQ ID NO: 2341 - protein, 7 aa, Artificial Sequence
  source: /note="Description of Artificial Sequence: Synthetic peptide"
YTSVLET

SEQ ID NO: 2342 - protein, 9 aa, Artificial Sequence
  source: /note="Description of Artificial Sequence: Synthetic peptide"
QQGDTLPWT

SEQ ID NO: 2343 - protein, 8 aa, Artificial Sequence
  source: /note="Description of Artificial Sequence: Synthetic peptide"
GYTFTSYD

SEQ ID NO: 2344 - protein, 8 aa, Artificial Sequence
  source: /note="Description of Artificial Sequence: Synthetic peptide"
IDPQSGGT

SEQ ID NO: 2345 - protein, 11 aa, Artificial Sequence
  source: /note="Description of Artificial Sequence: Synthetic peptide"
ARWDYGGYFDV

SEQ ID NO: 2346 - protein, 6 aa, Artificial Sequence
  source: /note="Description of Artificial Sequence: Synthetic peptide"
QDIYNY

SEQ ID NO: 2347 - protein, 3 aa, Artificial Sequence
  source: /note="Description of Artificial Sequence: Synthetic peptide"
YTS

SEQ ID NO: 2348 - protein, 9 aa, Artificial Sequence
  source: /note="Description of Artificial Sequence: Synthetic peptide"
QQGDTLPWT

SEQ ID NO: 2349 - protein, 5 aa, Artificial Sequence
  source: /note="Description of Artificial Sequence: Synthetic peptide"
SYDMH

SEQ ID NO: 2350 - protein, 17 aa, Artificial Sequence
  source: /note="Description of Artificial Sequence: Synthetic peptide"
RIDPQSGGIRYAQKFQG

SEQ ID NO: 2351 - protein, 9 aa, Artificial Sequence
  source: /note="Description of Artificial Sequence: Synthetic peptide"
WDYGGYFDV

SEQ ID NO: 2352 - protein, 11 aa, Artificial Sequence
  source: /note="Description of Artificial Sequence: Synthetic peptide"
RASQDIYNYLN

SEQ ID NO: 2353 - protein, 7 aa, Artificial Sequence
  source: /note="Description of Artificial Sequence: Synthetic peptide"
YTSVLET

SEQ ID NO: 2354 - protein, 9 aa, Artificial Sequence
  source: /note="Description of Artificial Sequence: Synthetic peptide"
QQGDTLPWT

SEQ ID NO: 2355 - protein, 7 aa, Artificial Sequence
  source: /note="Description of Artificial Sequence: Synthetic peptide"
GYTFTSY

SEQ ID NO: 2356 - protein, 6 aa, Artificial Sequence
  source: /note="Description of Artificial Sequence: Synthetic peptide"
DPQSGG

SEQ ID NO: 2357 - protein, 9 aa, Artificial Sequence
  source: /note="Description of Artificial Sequence: Synthetic peptide"
WDYGGYFDV

SEQ ID NO: 2358 - protein, 11 aa, Artificial Sequence
  source: /note="Description of Artificial Sequence: Synthetic peptide"
RASQDIYNYLN

SEQ ID NO: 2359 - protein, 7 aa, Artificial Sequence
  source: /note="Description of Artificial Sequence: Synthetic peptide"
YTSVLET

SEQ ID NO: 2360 - protein, 9 aa, Artificial Sequence
  source: /note="Description of Artificial Sequence: Synthetic peptide"
QQGDTLPWT

SEQ ID NO: 2361 - protein, 10 aa, Artificial Sequence
  source: /note="Description of Artificial Sequence: Synthetic peptide"
GYTFTSYDMH

SEQ ID NO: 2362 - protein, 10 aa, Artificial Sequence
  source: /note="Description of Artificial Sequence: Synthetic peptide"
RIDPQSGGIR

SEQ ID NO: 2363 - protein, 9 aa, Artificial Sequence
  source: /note="Description of Artificial Sequence: Synthetic peptide"
WDYGGYFDV

SEQ ID NO: 2364 - protein, 11 aa, Artificial Sequence
  source: /note="Description of Artificial Sequence: Synthetic peptide"
RASQDIYNYLN

SEQ ID NO: 2365 - protein, 7 aa, Artificial Sequence
  source: /note="Description of Artificial Sequence: Synthetic peptide"
YTSVLET

SEQ ID NO: 2366 - protein, 9 aa, Artificial Sequence
  source: /note="Description of Artificial Sequence: Synthetic peptide"
QQGDTLPWT

SEQ ID NO: 2367 - protein, 8 aa, Artificial Sequence
  source: /note="Description of Artificial Sequence: Synthetic peptide"
GYTFTSYD

SEQ ID NO: 2368 - protein, 8 aa, Artificial Sequence
  source: /note="Description of Artificial Sequence: Synthetic peptide"
IDPQSGGI

SEQ ID NO: 2369 - protein, 11 aa, Artificial Sequence
  source: /note="Description of Artificial Sequence: Synthetic peptide"
ARWDYGGYFDV

SEQ ID NO: 2370 - protein, 6 aa, Artificial Sequence
  source: /note="Description of Artificial Sequence: Synthetic peptide"
QDIYNY

SEQ ID NO: 2371 - protein, 3 aa, Artificial Sequence
  source: /note="Description of Artificial Sequence: Synthetic peptide"
YTS

SEQ ID NO: 2372 - protein, 9 aa, Artificial Sequence
  source: /note="Description of Artificial Sequence: Synthetic peptide"
QQGDTLPWT

SEQ ID NO: 2373 - protein, 5 aa, Artificial Sequence
  source: /note="Description of Artificial Sequence: Synthetic peptide"
SYDMH

SEQ ID NO: 2374 - protein, 17 aa, Artificial Sequence
  source: /note="Description of Artificial Sequence: Synthetic peptide"
RIDPQSGGVKYAQKFQG

SEQ ID NO: 2375 - protein, 9 aa, Artificial Sequence
  source: /note="Description of Artificial Sequence: Synthetic peptide"
WDYGGYFDV

SEQ ID NO: 2376 - protein, 11 aa, Artificial Sequence
  source: /note="Description of Artificial Sequence: Synthetic peptide"
RASQDIYNYLN

SEQ ID NO: 2377 - protein, 7 aa, Artificial Sequence
  source: /note="Description of Artificial Sequence: Synthetic peptide"
YTSVLET

SEQ ID NO: 2378 - protein, 9 aa, Artificial Sequence
  source: /note="Description of Artificial Sequence: Synthetic peptide"
QQGDELPWT

SEQ ID NO: 2379 - protein, 7 aa, Artificial Sequence
  source: /note="Description of Artificial Sequence: Synthetic peptide"
GYTFTSY

SEQ ID NO: 2380 - protein, 6 aa, Artificial Sequence
  source: /note="Description of Artificial Sequence: Synthetic peptide"
DPQSGG

SEQ ID NO: 2381 - protein, 9 aa, Artificial Sequence
  source: /note="Description of Artificial Sequence: Synthetic peptide"
WDYGGYFDV

SEQ ID NO: 2382 - protein, 11 aa, Artificial Sequence
  source: /note="Description of Artificial Sequence: Synthetic peptide"
RASQDIYNYLN

SEQ ID NO: 2383 - protein, 6 aa, Artificial Sequence
  source: /note="Description of Artificial Sequence: Synthetic peptide"
TSVLET

SEQ ID NO: 2384 - protein, 9 aa, Artificial Sequence
  source: /note="Description of Artificial Sequence: Synthetic peptide"
QQGDELPWT

SEQ ID NO: 2385 - protein, 10 aa, Artificial Sequence
  source: /note="Description of Artificial Sequence: Synthetic peptide"
GYTFTSYDMH

SEQ ID NO: 2386 - protein, 10 aa, Artificial Sequence
  source: /note="Description of Artificial Sequence: Synthetic peptide"
RIDPQSGGVK

SEQ ID NO: 2387 - protein, 9 aa, Artificial Sequence
  source: /note="Description of Artificial Sequence: Synthetic peptide"
WDYGGYFDV

SEQ ID NO: 2388 - protein, 11 aa, Artificial Sequence
  source: /note="Description of Artificial Sequence: Synthetic peptide"
RASQDIYNYLN

SEQ ID NO: 2389 - protein, 7 aa, Artificial Sequence
  source: /note="Description of Artificial Sequence: Synthetic peptide"
YTSVLET

SEQ ID NO: 2390 - protein, 9 aa, Artificial Sequence
  source: /note="Description of Artificial Sequence: Synthetic peptide"
QQGDELPWT

SEQ ID NO: 2391 - protein, 8 aa, Artificial Sequence
  source: /note="Description of Artificial Sequence: Synthetic peptide"
GYTFTSYD

SEQ ID NO: 2392 - protein, 8 aa, Artificial Sequence
  source: /note="Description of Artificial Sequence: Synthetic peptide"
IDPQSGGV

SEQ ID NO: 2393 - protein, 11 aa, Artificial Sequence
  source: /note="Description of Artificial Sequence: Synthetic peptide"
ARWDYGGYFDV

SEQ ID NO: 2394 - protein, 6 aa, Artificial Sequence
  source: /note="Description of Artificial Sequence: Synthetic peptide"
QDIYNY

SEQ ID NO: 2395 - protein, 3 aa, Artificial Sequence
  source: /note="Description of Artificial Sequence: Synthetic peptide"
YTS

SEQ ID NO: 2396 - protein, 9 aa, Artificial Sequence
  source: /note="Description of Artificial Sequence: Synthetic peptide"
QQGDELPWT

SEQ ID NO: 2397 - protein, 5 aa, Artificial Sequence
  source: /note="Description of Artificial Sequence: Synthetic peptide"
SYDMH

SEQ ID NO: 2398 - protein, 17 aa, Artificial Sequence
  source: /note="Description of Artificial Sequence: Synthetic peptide"
RIDPQTGDIKYAQKFQG

SEQ ID NO: 2399 - protein, 9 aa, Artificial Sequence
  source: /note="Description of Artificial Sequence: Synthetic peptide"
WDYGGQFDV

SEQ ID NO: 2400 - protein, 11 aa, Artificial Sequence
  source: /note="Description of Artificial Sequence: Synthetic peptide"
RASQDIYNYLN

SEQ ID NO: 2401 - protein, 7 aa, Artificial Sequence
  source: /note="Description of Artificial Sequence: Synthetic peptide"
YTSGLET

SEQ ID NO: 2402 - protein, 9 aa, Artificial Sequence
  source: /note="Description of Artificial Sequence: Synthetic peptide"
QQGDTLPWT

SEQ ID NO: 2403 - protein, 7 aa, Artificial Sequence
  source: /note="Description of Artificial Sequence: Synthetic peptide"
GYTFTSY

SEQ ID NO: 2404 - protein, 6 aa, Artificial Sequence
  source: /note="Description of Artificial Sequence: Synthetic peptide"
DPQTGD

SEQ ID NO: 2405 - protein, 9 aa, Artificial Sequence
  source: /note="Description of Artificial Sequence: Synthetic peptide"
WDYGGQFDV

SEQ ID NO: 2406 - protein, 11 aa, Artificial Sequence
  source: /note="Description of Artificial Sequence: Synthetic peptide"
RASQDIYNYLN

SEQ ID NO: 2407 - protein, 7 aa, Artificial Sequence
  source: /note="Description of Artificial Sequence: Synthetic peptide"
YTSGLET

SEQ ID NO: 2408 - protein, 9 aa, Artificial Sequence
  source: /note="Description of Artificial Sequence: Synthetic peptide"
QQGDTLPWT

SEQ ID NO: 2409 - protein, 10 aa, Artificial Sequence
  source: /note="Description of Artificial Sequence: Synthetic peptide"
GYTFTSYDMH

SEQ ID NO: 2410 - protein, 10 aa, Artificial Sequence
  source: /note="Description of Artificial Sequence: Synthetic peptide"
RIDPQTGDIK

SEQ ID NO: 2411 - protein, 9 aa, Artificial Sequence
  source: /note="Description of Artificial Sequence: Synthetic peptide"
WDYGGQFDV

SEQ ID NO: 2412 - protein, 11 aa, Artificial Sequence
  source: /note="Description of Artificial Sequence: Synthetic peptide"
RASQDIYNYLN

SEQ ID NO: 2413 - protein, 7 aa, Artificial Sequence
  source: /note="Description of Artificial Sequence: Synthetic peptide"
YTSGLET

SEQ ID NO: 2414 - protein, 9 aa, Artificial Sequence
  source: /note="Description of Artificial Sequence: Synthetic peptide"
QQGDTLPWT

SEQ ID NO: 2415 - protein, 8 aa, Artificial Sequence
  source: /note="Description of Artificial Sequence: Synthetic peptide"
GYTFTSYD

SEQ ID NO: 2416 - protein, 8 aa, Artificial Sequence
  source: /note="Description of Artificial Sequence: Synthetic peptide"
IDPQTGDI

SEQ ID NO: 2417 - protein, 11 aa, Artificial Sequence
  source: /note="Description of Artificial Sequence: Synthetic peptide"
ARWDYGGQFDV

SEQ ID NO: 2418 - protein, 6 aa, Artificial Sequence
  source: /note="Description of Artificial Sequence: Synthetic peptide"
QDIYNY

SEQ ID NO: 2419 - protein, 3 aa, Artificial Sequence
  source: /note="Description of Artificial Sequence: Synthetic peptide"
YTS

SEQ ID NO: 2420 - protein, 9 aa, Artificial Sequence
  source: /note="Description of Artificial Sequence: Synthetic peptide"
QQGDTLPWT

SEQ ID NO: 2421 - protein, 5 aa, Artificial Sequence
  source: /note="Description of Artificial Sequence: Synthetic peptide"
SYDTH

SEQ ID NO: 2422 - protein, 17 aa, Artificial Sequence
  source: /note="Description of Artificial Sequence: Synthetic peptide"
RIDPQSGGIKYAQKFQG

SEQ ID NO: 2423 - protein, 9 aa, Artificial Sequence
  source: /note="Description of Artificial Sequence: Synthetic peptide"
WDYGGYFDV

SEQ ID NO: 2424 - protein, 11 aa, Artificial Sequence
  source: /note="Description of Artificial Sequence: Synthetic peptide"
RASQDIYNYLN

SEQ ID NO: 2425 - protein, 7 aa, Artificial Sequence
  source: /note="Description of Artificial Sequence: Synthetic peptide"
YTSYLET

SEQ ID NO: 2426 - protein, 9 aa, Artificial Sequence
  source: /note="Description of Artificial Sequence: Synthetic peptide"
QQGDTLPWT

SEQ ID NO: 2427 - protein, 7 aa, Artificial Sequence
  source: /note="Description of Artificial Sequence: Synthetic peptide"
GYTFTSY

SEQ ID NO: 2428 - protein, 6 aa, Artificial Sequence
  source: /note="Description of Artificial Sequence: Synthetic peptide"
DPQSGG

SEQ ID NO: 2429 - protein, 9 aa, Artificial Sequence
  source: /note="Description of Artificial Sequence: Synthetic peptide"
WDYGGYFDV

SEQ ID NO: 2430 - protein, 11 aa, Artificial Sequence
  source: /note="Description of Artificial Sequence: Synthetic peptide"
RASQDIYNYLN

SEQ ID NO: 2431 - protein, 7 aa, Artificial Sequence
  source: /note="Description of Artificial Sequence: Synthetic peptide"
YTSYLET

SEQ ID NO: 2432 - protein, 9 aa, Artificial Sequence
  source: /note="Description of Artificial Sequence: Synthetic peptide"
QQGDTLPWT

SEQ ID NO: 2433 - protein, 10 aa, Artificial Sequence
  source: /note="Description of Artificial Sequence: Synthetic peptide"
GYTFTSYDTH

SEQ ID NO: 2434 - protein, 10 aa, Artificial Sequence
  source: /note="Description of Artificial Sequence: Synthetic peptide"
RIDPQSGGIK

SEQ ID NO: 2435 - protein, 9 aa, Artificial Sequence
  source: /note="Description of Artificial Sequence: Synthetic peptide"
WDYGGYFDV

SEQ ID NO: 2436 - protein, 11 aa, Artificial Sequence
  source: /note="Description of Artificial Sequence: Synthetic peptide"
RASQDIYNYLN

SEQ ID NO: 2437 - protein, 7 aa, Artificial Sequence
  source: /note="Description of Artificial Sequence: Synthetic peptide"
YTSYLET

SEQ ID NO: 2438 - protein, 9 aa, Artificial Sequence
  source: /note="Description of Artificial Sequence: Synthetic peptide"
QQGDTLPWT

SEQ ID NO: 2439 - protein, 8 aa, Artificial Sequence
  source: /note="Description of Artificial Sequence: Synthetic peptide"
GYTFTSYD

SEQ ID NO: 2440 - protein, 8 aa, Artificial Sequence
  source: /note="Description of Artificial Sequence: Synthetic peptide"
IDPQSGGI

SEQ ID NO: 2441 - protein, 11 aa, Artificial Sequence
  source: /note="Description of Artificial Sequence: Synthetic peptide"
ARWDYGGYFDV

SEQ ID NO: 2442 - protein, 6 aa, Artificial Sequence
  source: /note="Description of Artificial Sequence: Synthetic peptide"
QDIYNY

SEQ ID NO: 2443 - protein, 3 aa, Artificial Sequence
  source: /note="Description of Artificial Sequence: Synthetic peptide"
YTS

SEQ ID NO: 2444 - protein, 9 aa, Artificial Sequence
  source: /note="Description of Artificial Sequence: Synthetic peptide"
QQGDTLPWT

SEQ ID NO: 2445 - protein, 5 aa, Artificial Sequence
  source: /note="Description of Artificial Sequence: Synthetic peptide"
SYDMH

SEQ ID NO: 2446 - protein, 17 aa, Artificial Sequence
  source: /note="Description of Artificial Sequence: Synthetic peptide"
RIDPQSGGIKYAQKFQG

SEQ ID NO: 2447 - protein, 9 aa, Artificial Sequence
  source: /note="Description of Artificial Sequence: Synthetic peptide"
WDYGGYFDV

SEQ ID NO: 2448 - protein, 11 aa, Artificial Sequence
  source: /note="Description of Artificial Sequence: Synthetic peptide"
RASQDIYNYLN

SEQ ID NO: 2449 - protein, 7 aa, Artificial Sequence
  source: /note="Description of Artificial Sequence: Synthetic peptide"
YTSRLET

SEQ ID NO: 2450 - protein, 9 aa, Artificial Sequence
  source: /note="Description of Artificial Sequence: Synthetic peptide"
QQGDTLPWT

SEQ ID NO: 2451 - protein, 7 aa, Artificial Sequence
  source: /note="Description of Artificial Sequence: Synthetic peptide"
GYTFTSY

SEQ ID NO: 2452 - protein, 6 aa, Artificial Sequence
  source: /note="Description of Artificial Sequence: Synthetic peptide"
DPQSGG

SEQ ID NO: 2453 - protein, 9 aa, Artificial Sequence
  source: /note="Description of Artificial Sequence: Synthetic peptide"
WDYGGYFDV

SEQ ID NO: 2454 - protein, 11 aa, Artificial Sequence
  source: /note="Description of Artificial Sequence: Synthetic peptide"
RASQDIYNYLN

SEQ ID NO: 2455 - protein, 7 aa, Artificial Sequence
  source: /note="Description of Artificial Sequence: Synthetic peptide"
YTSRLET

SEQ ID NO: 2456 - protein, 9 aa, Artificial Sequence
  source: /note="Description of Artificial Sequence: Synthetic peptide"
QQGDTLPWT

SEQ ID NO: 2457 - protein, 10 aa, Artificial Sequence
  source: /note="Description of Artificial Sequence: Synthetic peptide"
GYTFTSYDMH

SEQ ID NO: 2458 - protein, 10 aa, Artificial Sequence
  source: /note="Description of Artificial Sequence: Synthetic peptide"
RIDPQSGGIK

SEQ ID NO: 2459 - protein, 9 aa, Artificial Sequence
  source: /note="Description of Artificial Sequence: Synthetic peptide"
WDYGGYFDV

SEQ ID NO: 2460 - protein, 11 aa, Artificial Sequence
  source: /note="Description of Artificial Sequence: Synthetic peptide"
RASQDIYNYLN

SEQ ID NO: 2461 - protein, 7 aa, Artificial Sequence
  source: /note="Description of Artificial Sequence: Synthetic peptide"
YTSRLET

SEQ ID NO: 2462 - protein, 9 aa, Artificial Sequence
  source: /note="Description of Artificial Sequence: Synthetic peptide"
QQGDTLPWT

SEQ ID NO: 2463 - protein, 8 aa, Artificial Sequence
  source: /note="Description of Artificial Sequence: Synthetic peptide"
GYTFTSYD

SEQ ID NO: 2464 - protein, 8 aa, Artificial Sequence
  source: /note="Description of Artificial Sequence: Synthetic peptide"
IDPQSGGI

SEQ ID NO: 2465 - protein, 11 aa, Artificial Sequence
  source: /note="Description of Artificial Sequence: Synthetic peptide"
ARWDYGGYFDV

SEQ ID NO: 2466 - protein, 6 aa, Artificial Sequence
  source: /note="Description of Artificial Sequence: Synthetic peptide"
QDIYNY

SEQ ID NO: 2467 - protein, 3 aa, Artificial Sequence
  source: /note="Description of Artificial Sequence: Synthetic peptide"
YTS

SEQ ID NO: 2468 - protein, 9 aa, Artificial Sequence
  source: /note="Description of Artificial Sequence: Synthetic peptide"
QQGDTLPWT

SEQ ID NO: 2469 - protein, 5 aa, Artificial Sequence
  source: /note="Description of Artificial Sequence: Synthetic peptide"
SYDMH

SEQ ID NO: 2470 - protein, 17 aa, Artificial Sequence
  source: /note="Description of Artificial Sequence: Synthetic peptide"
RIDPQSGGIKYAQKFQG

SEQ ID NO: 2471 - protein, 9 aa, Artificial Sequence
  source: /note="Description of Artificial Sequence: Synthetic peptide"
WDYGGYFDV

SEQ ID NO: 2472 - protein, 11 aa, Artificial Sequence
  source: /note="Description of Artificial Sequence: Synthetic peptide"
RASQDIYNYLN

SEQ ID NO: 2473 - protein, 7 aa, Artificial Sequence
  source: /note="Description of Artificial Sequence: Synthetic peptide"
YTSVLET

SEQ ID NO: 2474 - protein, 9 aa, Artificial Sequence
  source: /note="Description of Artificial Sequence: Synthetic peptide"
QQGDTLPWT

SEQ ID NO: 2475 - protein, 7 aa, Artificial Sequence
  source: /note="Description of Artificial Sequence: Synthetic peptide"
GYTFTSY

SEQ ID NO: 2476 - protein, 6 aa, Artificial Sequence
  source: /note="Description of Artificial Sequence: Synthetic peptide"
DPQSGG

SEQ ID NO: 2477 - protein, 9 aa, Artificial Sequence
  source: /note="Description of Artificial Sequence: Synthetic peptide"
WDYGGYFDV

SEQ ID NO: 2478 - protein, 11 aa, Artificial Sequence
  source: /note="Description of Artificial Sequence: Synthetic peptide"
RASQDIYNYLN

SEQ ID NO: 2479 - protein, 7 aa, Artificial Sequence
  source: /note="Description of Artificial Sequence: Synthetic peptide"
YTSVLET

SEQ ID NO: 2480 - protein, 9 aa, Artificial Sequence
  source: /note="Description of Artificial Sequence: Synthetic peptide"
QQGDTLPWT

SEQ ID NO: 2481 - protein, 10 aa, Artificial Sequence
  source: /note="Description of Artificial Sequence: Synthetic peptide"
GYTFTSYDMH

SEQ ID NO: 2482 - protein, 10 aa, Artificial Sequence
  source: /note="Description of Artificial Sequence: Synthetic peptide"
RIDPQSGGIK

SEQ ID NO: 2483 - protein, 9 aa, Artificial Sequence
  source: /note="Description of Artificial Sequence: Synthetic peptide"
WDYGGYFDV

SEQ ID NO: 2484 - protein, 11 aa, Artificial Sequence
  source: /note="Description of Artificial Sequence: Synthetic peptide"
RASQDIYNYLN

SEQ ID NO: 2485 - protein, 7 aa, Artificial Sequence
  source: /note="Description of Artificial Sequence: Synthetic peptide"
YTSVLET

SEQ ID NO: 2486 - protein, 9 aa, Artificial Sequence
  source: /note="Description of Artificial Sequence: Synthetic peptide"
QQGDTLPWT

SEQ ID NO: 2487 - protein, 8 aa, Artificial Sequence
  source: /note="Description of Artificial Sequence: Synthetic peptide"
GYTFTSYD

SEQ ID NO: 2488 - protein, 8 aa, Artificial Sequence
  source: /note="Description of Artificial Sequence: Synthetic peptide"
IDPQSGGI

SEQ ID NO: 2489 - protein, 11 aa, Artificial Sequence
  source: /note="Description of Artificial Sequence: Synthetic peptide"
ARWDYGGYFDV

SEQ ID NO: 2490 - protein, 6 aa, Artificial Sequence
  source: /note="Description of Artificial Sequence: Synthetic peptide"
QDIYNY

SEQ ID NO: 2491 - protein, 3 aa, Artificial Sequence
  source: /note="Description of Artificial Sequence: Synthetic peptide"
YTS

SEQ ID NO: 2492 - protein, 9 aa, Artificial Sequence
  source: /note="Description of Artificial Sequence: Synthetic peptide"
QQGDTLPWT

SEQ ID NO: 2493 - protein, 5 aa, Artificial Sequence
  source: /note="Description of Artificial Sequence: Synthetic peptide"
SYDMH

SEQ ID NO: 2494 - protein, 17 aa, Artificial Sequence
  source: /note="Description of Artificial Sequence: Synthetic peptide"
RIDPQSGGIKYAQKFQG

SEQ ID NO: 2495 - protein, 9 aa, Artificial Sequence
  source: /note="Description of Artificial Sequence: Synthetic peptide"
WDYGGYFDV

SEQ ID NO: 2496 - protein, 11 aa, Artificial Sequence
  source: /note="Description of Artificial Sequence: Synthetic peptide"
RASQDIYNYLN

SEQ ID NO: 2497 - protein, 7 aa, Artificial Sequence
  source: /note="Description of Artificial Sequence: Synthetic peptide"
YTSRLET

SEQ ID NO: 2498 - protein, 9 aa, Artificial Sequence
  source: /note="Description of Artificial Sequence: Synthetic peptide"
QQGDELPWT

SEQ ID NO: 2499 - protein, 7 aa, Artificial Sequence
  source: /note="Description of Artificial Sequence: Synthetic peptide"
GYTFTSY

SEQ ID NO: 2500 - protein, 6 aa, Artificial Sequence
  source: /note="Description of Artificial Sequence: Synthetic peptide"
DPQSGG

SEQ ID NO: 2501 - protein, 9 aa, Artificial Sequence
  source: /note="Description of Artificial Sequence: Synthetic peptide"
WDYGGYFDV

SEQ ID NO: 2502 - protein, 11 aa, Artificial Sequence
  source: /note="Description of Artificial Sequence: Synthetic peptide"
RASQDIYNYLN

SEQ ID NO: 2503 - protein, 7 aa, Artificial Sequence
  source: /note="Description of Artificial Sequence: Synthetic peptide"
YTSRLET

SEQ ID NO: 2504 - protein, 9 aa, Artificial Sequence
  source: /note="Description of Artificial Sequence: Synthetic peptide"
QQGDELPWT

SEQ ID NO: 2505 - protein, 10 aa, Artificial Sequence
  source: /note="Description of Artificial Sequence: Synthetic peptide"
GYTFTSYDMH

SEQ ID NO: 2506 - protein, 10 aa, Artificial Sequence
  source: /note="Description of Artificial Sequence: Synthetic peptide"
RIDPQSGGIK

SEQ ID NO: 2507 - protein, 9 aa, Artificial Sequence
  source: /note="Description of Artificial Sequence: Synthetic peptide"
WDYGGYFDV

SEQ ID NO: 2508 - protein, 11 aa, Artificial Sequence
  source: /note="Description of Artificial Sequence: Synthetic peptide"
RASQDIYNYLN

SEQ ID NO: 2509 - protein, 7 aa, Artificial Sequence
  source: /note="Description of Artificial Sequence: Synthetic peptide"
YTSRLET

SEQ ID NO: 2510 - protein, 9 aa, Artificial Sequence
  source: /note="Description of Artificial Sequence: Synthetic peptide"
QQGDELPWT

SEQ ID NO: 2511 - protein, 8 aa, Artificial Sequence
  source: /note="Description of Artificial Sequence: Synthetic peptide"
GYTFTSYD

SEQ ID NO: 2512 - protein, 8 aa, Artificial Sequence
  source: /note="Description of Artificial Sequence: Synthetic peptide"
IDPQSGGI

SEQ ID NO: 2513 - protein, 11 aa, Artificial Sequence
  source: /note="Description of Artificial Sequence: Synthetic peptide"
ARWDYGGYFDV

SEQ ID NO: 2514 - protein, 6 aa, Artificial Sequence
  source: /note="Description of Artificial Sequence: Synthetic peptide"
QDIYNY

SEQ ID NO: 2515 - protein, 3 aa, Artificial Sequence
  source: /note="Description of Artificial Sequence: Synthetic peptide"
YTS

SEQ ID NO: 2516 - protein, 9 aa, Artificial Sequence
  source: /note="Description of Artificial Sequence: Synthetic peptide"
QQGDELPWT

SEQ ID NO: 2517 - protein, 5 aa, Artificial Sequence
  source: /note="Description of Artificial Sequence: Synthetic peptide"
SYDMH

SEQ ID NO: 2518 - protein, 17 aa, Artificial Sequence
  source: /note="Description of Artificial Sequence: Synthetic peptide"
RIDPQSGGIKYAQKFQG

SEQ ID NO: 2519 - protein, 9 aa, Artificial Sequence
  source: /note="Description of Artificial Sequence: Synthetic peptide"
YDHGGYFDV

SEQ ID NO: 2520 - protein, 11 aa, Artificial Sequence
  source: /note="Description of Artificial Sequence: Synthetic peptide"
RASQDIYNYLN

SEQ ID NO: 2521 - protein, 7 aa, Artificial Sequence
  source: /note="Description of Artificial Sequence: Synthetic peptide"
YTSRLET

SEQ ID NO: 2522 - protein, 9 aa, Artificial Sequence
  source: /note="Description of Artificial Sequence: Synthetic peptide"
QQGDTLPWT

SEQ ID NO: 2523 - protein, 7 aa, Artificial Sequence
  source: /note="Description of Artificial Sequence: Synthetic peptide"
GYTFTSY

SEQ ID NO: 2524 - protein, 6 aa, Artificial Sequence
  source: /note="Description of Artificial Sequence: Synthetic peptide"
DPQSGG

SEQ ID NO: 2525 - protein, 9 aa, Artificial Sequence
  source: /note="Description of Artificial Sequence: Synthetic peptide"
YDHGGYFDV

SEQ ID NO: 2526 - protein, 11 aa, Artificial Sequence
  source: /note="Description of Artificial Sequence: Synthetic peptide"
RASQDIYNYLN

SEQ ID NO: 2527 - protein, 7 aa, Artificial Sequence
  source: /note="Description of Artificial Sequence: Synthetic peptide"
YTSRLET

SEQ ID NO: 2528 - protein, 9 aa, Artificial Sequence
  source: /note="Description of Artificial Sequence: Synthetic peptide"
QQGDTLPWT

SEQ ID NO: 2529 - protein, 10 aa, Artificial Sequence
  source: /note="Description of Artificial Sequence: Synthetic peptide"
GYTFTSYDMH

SEQ ID NO: 2530 - protein, 10 aa, Artificial Sequence
  source: /note="Description of Artificial Sequence: Synthetic peptide"
RIDPQSGGIK

SEQ ID NO: 2531 - protein, 9 aa, Artificial Sequence
  source: /note="Description of Artificial Sequence: Synthetic peptide"
YDHGGYFDV

SEQ ID NO: 2532 - protein, 11 aa, Artificial Sequence
  source: /note="Description of Artificial Sequence: Synthetic peptide"
RASQDIYNYLN

SEQ ID NO: 2533 - protein, 7 aa, Artificial Sequence
  source: /note="Description of Artificial Sequence: Synthetic peptide"
YTSRLET

SEQ ID NO: 2534 - protein, 9 aa, Artificial Sequence
  source: /note="Description of Artificial Sequence: Synthetic peptide"
QQGDTLPWT

SEQ ID NO: 2535 - protein, 8 aa, Artificial Sequence
  source: /note="Description of Artificial Sequence: Synthetic peptide"
GYTFTSYD

SEQ ID NO: 2536 - protein, 8 aa, Artificial Sequence
  source: /note="Description of Artificial Sequence: Synthetic peptide"
IDPQSGGI

SEQ ID NO: 2537 - protein, 11 aa, Artificial Sequence
  source: /note="Description of Artificial Sequence: Synthetic peptide"
ARYDHGGYFDV

SEQ ID NO: 2538 - protein, 6 aa, Artificial Sequence
  source: /note="Description of Artificial Sequence: Synthetic peptide"
QDIYNY

SEQ ID NO: 2539 - protein, 3 aa, Artificial Sequence
  source: /note="Description of Artificial Sequence: Synthetic peptide"
YTS

SEQ ID NO: 2540 - protein, 9 aa, Artificial Sequence
  source: /note="Description of Artificial Sequence: Synthetic peptide"
QQGDTLPWT

SEQ ID NO: 2541 - protein, 5 aa, Artificial Sequence
  source: /note="Description of Artificial Sequence: Synthetic peptide"
SYDMH

SEQ ID NO: 2542 - protein, 17 aa, Artificial Sequence
  source: /note="Description of Artificial Sequence: Synthetic peptide"
RIDPQSGGIKYAQKFQG

SEQ ID NO: 2543 - protein, 9 aa, Artificial Sequence
  source: /note="Description of Artificial Sequence: Synthetic peptide"
YDHGGYFDV

SEQ ID NO: 2544 - protein, 11 aa, Artificial Sequence
  source: /note="Description of Artificial Sequence: Synthetic peptide"
RASQDIYNYLN

SEQ ID NO: 2545 - protein, 7 aa, Artificial Sequence
  source: /note="Description of Artificial Sequence: Synthetic peptide"
YTSYLET

SEQ ID NO: 2546 - protein, 9 aa, Artificial Sequence
  source: /note="Description of Artificial Sequence: Synthetic peptide"
QQGDTLPWT

SEQ ID NO: 2547 - protein, 7 aa, Artificial Sequence
  source: /note="Description of Artificial Sequence: Synthetic peptide"
GYTFTSY

SEQ ID NO: 2548 - protein, 6 aa, Artificial Sequence
  source: /note="Description of Artificial Sequence: Synthetic peptide"
DPQSGG

SEQ ID NO: 2549 - protein, 9 aa, Artificial Sequence
  source: /note="Description of Artificial Sequence: Synthetic peptide"
YDHGGYFDV

SEQ ID NO: 2550 - protein, 11 aa, Artificial Sequence
  source: /note="Description of Artificial Sequence: Synthetic peptide"
RASQDIYNYLN

SEQ ID NO: 2551 - protein, 7 aa, Artificial Sequence
  source: /note="Description of Artificial Sequence: Synthetic peptide"
YTSYLET

SEQ ID NO: 2552 - protein, 9 aa, Artificial Sequence
  source: /note="Description of Artificial Sequence: Synthetic peptide"
QQGDTLPWT

SEQ ID NO: 2553 - protein, 10 aa, Artificial Sequence
  source: /note="Description of Artificial Sequence: Synthetic peptide"
GYTFTSYDMH

SEQ ID NO: 2554 - protein, 10 aa, Artificial Sequence
  source: /note="Description of Artificial Sequence: Synthetic peptide"
RIDPQSGGIK

SEQ ID NO: 2555 - protein, 9 aa, Artificial Sequence
  source: /note="Description of Artificial Sequence: Synthetic peptide"
YDHGGYFDV

SEQ ID NO: 2556 - protein, 11 aa, Artificial Sequence
  source: /note="Description of Artificial Sequence: Synthetic peptide"
RASQDIYNYLN

SEQ ID NO: 2557 - protein, 7 aa, Artificial Sequence
  source: /note="Description of Artificial Sequence: Synthetic peptide"
YTSYLET

SEQ ID NO: 2558 - protein, 9 aa, Artificial Sequence
  source: /note="Description of Artificial Sequence: Synthetic peptide"
QQGDTLPWT

SEQ ID NO: 2559 - protein, 8 aa, Artificial Sequence
  source: /note="Description of Artificial Sequence: Synthetic peptide"
GYTFTSYD

SEQ ID NO: 2560 - protein, 8 aa, Artificial Sequence
  source: /note="Description of Artificial Sequence: Synthetic peptide"
IDPQSGGI

SEQ ID NO: 2561 - protein, 11 aa, Artificial Sequence
  source: /note="Description of Artificial Sequence: Synthetic peptide"
ARYDHGGYFDV

SEQ ID NO: 2562 - protein, 6 aa, Artificial Sequence
  source: /note="Description of Artificial Sequence: Synthetic peptide"
QDIYNY

SEQ ID NO: 2563 - protein, 3 aa, Artificial Sequence
  source: /note="Description of Artificial Sequence: Synthetic peptide"
YTS

SEQ ID NO: 2564 - protein, 9 aa, Artificial Sequence
  source: /note="Description of Artificial Sequence: Synthetic peptide"
QQGDTLPWT

SEQ ID NO: 2565 - protein, 5 aa, Artificial Sequence
  source: /note="Description of Artificial Sequence: Synthetic peptide"
SYDMH

SEQ ID NO: 2566 - protein, 17 aa, Artificial Sequence
  source: /note="Description of Artificial Sequence: Synthetic peptide"
RIDPQSGGEKYAQKFQG

SEQ ID NO: 2567 - protein, 9 aa, Artificial Sequence
  source: /note="Description of Artificial Sequence: Synthetic peptide"
YDYGGYFDV

SEQ ID NO: 2568 - protein, 11 aa, Artificial Sequence
  source: /note="Description of Artificial Sequence: Synthetic peptide"
RASQDIYNYLN

SEQ ID NO: 2569 - protein, 7 aa, Artificial Sequence
  source: /note="Description of Artificial Sequence: Synthetic peptide"
YTSRLET

SEQ ID NO: 2570 - protein, 9 aa, Artificial Sequence
  source: /note="Description of Artificial Sequence: Synthetic peptide"
QQGDTLPWT

SEQ ID NO: 2571 - protein, 7 aa, Artificial Sequence
  source: /note="Description of Artificial Sequence: Synthetic peptide"
GYTFTSY

SEQ ID NO: 2572 - protein, 6 aa, Artificial Sequence
  source: /note="Description of Artificial Sequence: Synthetic peptide"
DPQSGG

SEQ ID NO: 2573 - protein, 9 aa, Artificial Sequence
  source: /note="Description of Artificial Sequence: Synthetic peptide"
YDYGGYFDV

SEQ ID NO: 2574 - protein, 11 aa, Artificial Sequence
  source: /note="Description of Artificial Sequence: Synthetic peptide"
RASQDIYNYLN

SEQ ID NO: 2575 - protein, 7 aa, Artificial Sequence
  source: /note="Description of Artificial Sequence: Synthetic peptide"
YTSRLET

SEQ ID NO: 2576 - protein, 9 aa, Artificial Sequence
  source: /note="Description of Artificial Sequence: Synthetic peptide"
QQGDTLPWT

SEQ ID NO: 2577 - protein, 10 aa, Artificial Sequence
  source: /note="Description of Artificial Sequence: Synthetic peptide"
GYTFTSYDMH

SEQ ID NO: 2578 - protein, 10 aa, Artificial Sequence
  source: /note="Description of Artificial Sequence: Synthetic peptide"
RIDPQSGGEK

SEQ ID NO: 2579 - protein, 9 aa, Artificial Sequence
  source: /note="Description of Artificial Sequence: Synthetic peptide"
YDYGGYFDV

SEQ ID NO: 2580 - protein, 11 aa, Artificial Sequence
  source: /note="Description of Artificial Sequence: Synthetic peptide"
RASQDIYNYLN

SEQ ID NO: 2581 - protein, 7 aa, Artificial Sequence
  source: /note="Description of Artificial Sequence: Synthetic peptide"
YTSRLET

SEQ ID NO: 2582 - protein, 9 aa, Artificial Sequence
  source: /note="Description of Artificial Sequence: Synthetic peptide"
QQGDTLPWT

SEQ ID NO: 2583 - protein, 8 aa, Artificial Sequence
  source: /note="Description of Artificial Sequence: Synthetic peptide"
GYTFTSYD

SEQ ID NO: 2584 - protein, 8 aa, Artificial Sequence
  source: /note="Description of Artificial Sequence: Synthetic peptide"
IDPQSGGE

SEQ ID NO: 2585 - protein, 11 aa, Artificial Sequence
  source: /note="Description of Artificial Sequence: Synthetic peptide"
ARYDYGGYFDV

SEQ ID NO: 2586 - protein, 6 aa, Artificial Sequence
  source: /note="Description of Artificial Sequence: Synthetic peptide"
QDIYNY

SEQ ID NO: 2587 - protein, 3 aa, Artificial Sequence
  source: /note="Description of Artificial Sequence: Synthetic peptide"
YTS

SEQ ID NO: 2588 - protein, 9 aa, Artificial Sequence
  source: /note="Description of Artificial Sequence: Synthetic peptide"
QQGDTLPWT

SEQ ID NO: 2589 - protein, 118 aa, Artificial Sequence; identical to SEQ ID NO: 1177
  source: /note="Description of Artificial Sequence: Synthetic polypeptide"

SEQ ID NO: 2590 - protein, 118 aa, Artificial Sequence; identical to SEQ ID NO: 935
  source: /note="Description of Artificial Sequence: Synthetic polypeptide"

SEQ ID NO: 2591 - protein, 118 aa, Artificial Sequence; identical to SEQ ID NO: 1171
  source: /note="Description of Artificial Sequence: Synthetic polypeptide"

SEQ ID NO: 2592 - protein, 118 aa, Artificial Sequence; identical to SEQ ID NO: 1162
  source: /note="Description of Artificial Sequence: Synthetic polypeptide"

SEQ ID NO: 2593 - protein, 118 aa, Artificial Sequence; identical to SEQ ID NO: 945
  source: /note="Description of Artificial Sequence: Synthetic polypeptide"

SEQ ID NO: 2594 - protein, 118 aa, Artificial Sequence; identical to SEQ ID NO: 935
  source: /note="Description of Artificial Sequence: Synthetic polypeptide"

SEQ ID NO: 2595 - protein, 118 aa, Artificial Sequence; identical to SEQ ID NO: 614
  source: /note="Description of Artificial Sequence: Synthetic polypeptide"

SEQ ID NO: 2596 - protein, 118 aa, Artificial Sequence; identical to SEQ ID NO: 979
  source: /note="Description of Artificial Sequence: Synthetic polypeptide"

SEQ ID NO: 2597 - protein, 118 aa, Artificial Sequence; identical to SEQ ID NO: 1001
  source: /note="Description of Artificial Sequence: Synthetic polypeptide"

SEQ ID NO: 2598 - protein, 118 aa, Artificial Sequence; identical to SEQ ID NO: 922
  source: /note="Description of Artificial Sequence: Synthetic polypeptide"

SEQ ID NO: 2599 - protein, 118 aa, Artificial Sequence; identical to SEQ ID NO: 922
  source: /note="Description of Artificial Sequence: Synthetic polypeptide"

SEQ ID NO: 2600 - protein, 118 aa, Artificial Sequence; identical to SEQ ID NO: 922
  source: /note="Description of Artificial Sequence: Synthetic polypeptide"

SEQ ID NO: 2601 - protein, 118 aa, Artificial Sequence; identical to SEQ ID NO: 1040
  source: /note="Description of Artificial Sequence: Synthetic polypeptide"

SEQ ID NO: 2602 - protein, 118 aa, Artificial Sequence; identical to SEQ ID NO: 1040
  source: /note="Description of Artificial Sequence: Synthetic polypeptide"

SEQ ID NO: 2603 - protein, 120 aa, Artificial Sequence
  source: /note="Description of Artificial Sequence: Synthetic polypeptide"
EVQLVQSGAEVKKPGASVKVSCKASGYTFTSYDMHWVRQAPGQGLEWMGRIDPQSGGEKYAQKFQGRATLTVDTSTSTAYMELSRLRSDDTAVYYCARYDYGGYFDVWGQGTLVTVSSAS

SEQ ID NO: 2604 - protein, 107 aa, Artificial Sequence; identical to SEQ ID NO: 688
  source: /note="Description of Artificial Sequence: Synthetic polypeptide"

SEQ ID NO: 2605 - protein, 107 aa, Artificial Sequence
  source: /note="Description of Artificial Sequence: Synthetic polypeptide"
DIQMTQSPSSLSASVGDRVTITCRASQDIYSYLNWYQQKPGKAVKLLIYYTSNLETGVPSRFSGSGSGTDYTLTISSLQPEDFATYFCQQGDTLPWTFGQGTKLEIK

SEQ ID NO: 2606 - protein, 107 aa, Artificial Sequence; identical to SEQ ID NO: 687
  source: /note="Description of Artificial Sequence: Synthetic polypeptide"

SEQ ID NO: 2607 - protein, 107 aa, Artificial Sequence
  source: /note="Description of Artificial Sequence: Synthetic polypeptide"
DIQMTQSPSSLSASVGDRVTITCRASQDIFNYLNWYQQKPGKAVKLLIYYTSHLETGVPSRFSGSGSGTDYTLTISSLQPEDFATYFCQQGDTLPWTFGQGTKLEIK

SEQ ID NO: 2608 - protein, 107 aa, Artificial Sequence
  source: /note="Description of Artificial Sequence: Synthetic polypeptide"
DIQMTQSPSSLSASVGDRVTITCRASQDIYNYLNWYQQKPGKAVKLLIYYTSVLETGVPSRFSGSGSGTDYTLTISSLQPEDFATYFCQQGDTLPWTFGQGTKLEIK

SEQ ID NO: 2609 - protein, 107 aa, Artificial Sequence; identical to SEQ ID NO: 2608
  source: /note="Description of Artificial Sequence: Synthetic polypeptide"

SEQ ID NO: 2610 - protein, 107 aa, Artificial Sequence
  source: /note="Description of Artificial Sequence: Synthetic polypeptide"
DIQMTQSPSSLSASVGDRVTITCRASQDIYNYLNWYQQKPGKAVKLLIYYTSVLETGVPSRFSGSGSGTDYTLTISSLQPEDFATYFCQQGDELPWTFGQGTKLEIK

SEQ ID NO: 2611 - protein, 107 aa, Artificial Sequence; identical to SEQ ID NO: 687
  source: /note="Description of Artificial Sequence: Synthetic polypeptide"

SEQ ID NO: 2612 - protein, 107 aa, Artificial Sequence
  source: /note="Description of Artificial Sequence: Synthetic polypeptide"
DIQMTQSPSSLSASVGDRVTITCRASQDIYNYLNWYQQKPGKAVKLLIYYTSYLETGVPSRFSGSGSGTDYTLTISSLQPEDFATYFCQQGDTLPWTFGQGTKLEIK

SEQ ID NO: 2613 - protein, 107 aa, Artificial Sequence; identical to SEQ ID NO: 694
  source: /note="Description of Artificial Sequence: Synthetic polypeptide"

SEQ ID NO: 2614 - protein, 107 aa, Artificial Sequence; identical to SEQ ID NO: 2608
  source: /note="Description of Artificial Sequence: Synthetic polypeptide"

SEQ ID NO: 2615 - protein, 107 aa, Artificial Sequence
  source: /note="Description of Artificial Sequence: Synthetic polypeptide"
DIQMTQSPSSLSASVGDRVTITCRASQDIYNYLNWYQQKPGKAVKLLIYYTSRLETGVPSRFSGSGSGTDYTLTISSLQPEDFATYFCQQGDELPWTFGQGTKLEIK

SEQ ID NO: 2616 - protein, 107 aa, Artificial Sequence; identical to SEQ ID NO: 694
  source: /note="Description of Artificial Sequence: Synthetic polypeptide"

SEQ ID NO: 2617 - protein, 107 aa, Artificial Sequence; identical to SEQ ID NO: 2612
  source: /note="Description of Artificial Sequence: Synthetic polypeptide"

SEQ ID NO: 2618 - protein, 107 aa, Artificial Sequence; identical to SEQ ID NO: 694
  source: /note="Description of Artificial Sequence: Synthetic polypeptide"

SEQ ID NO: 2619 - protein, 448 aa, Artificial Sequence
  source: /note="Description of Artificial Sequence: Synthetic polypeptide"
EVQLVQSGAEVKKPGASVKVSCKASGYTFTSYDMHWVRQAPGQGLEWMGRIDPQSGGIRYAQKFQGRATLTVDTSTSTAYMELSRLRSDDTAVYYCARWDYGGQFDVWGQGTLVTVSSASTKGPSVFPLAPSSKSTSGGTAALGCLVKDYFPEPVTVSWNSGALTSGVHTFPAVLQSSGLYSLSSVVTVPSSSLGTQTYICNVNHKPSNTKVDKKVEPKSCDKTHTCPPCPAPEAAGGPSVFLFPPKPKDTLMISRTPEVTCVVVSVSHEDPEVKFNWYVDGVEVHNAKTKPREEQYNSTYRVVSVLTVLHQDWLNGKEYKCKVSNKALPAPIEKTISKAKGQPREPQVYTLPPSRDELTKNQVSLTCLVKGFYPSDIAVEWESNGQPENNYKTTPPVLDSDGSFFLYSKLTVDKSRWQQGNVFSCSVMHEALHNHYTQKSLSLSPGK

SEQ ID NO: 2620 - protein, 448 aa, Artificial Sequence
  source: /note="Description of Artificial Sequence: Synthetic polypeptide"
EVQLVQSGAEVKKPGASVKVSCKASGYTFTSYDMHWVRQAPGQGLEWMGRIDPQSGGIRYAQKFQGRATLTVDTSTSTAYMELSRLRSDDTAVYYCARWDYGGYFDVWGQGTLVTVSSASTKGPSVFPLAPSSKSTSGGTAALGCLVKDYFPEPVTVSWNSGALTSGVHTFPAVLQSSGLYSLSSVVTVPSSSLGTQTYICNVNHKPSNTKVDKKVEPKSCDKTHTCPPCPAPEAAGGPSVFLFPPKPKDTLMISRTPEVTCVVVSVSHEDPEVKFNWYVDGVEVHNAKTKPREEQYNSTYRVVSVLTVLHQDWLNGKEYKCKVSNKALPAPIEKTISKAKGQPREPQVYTLPPSRDELTKNQVSLTCLVKGFYPSDIAVEWESNGQPENNYKTTPPVLDSDGSFFLYSKLTVDKSRWQQGNVFSCSVMHEALHNHYTQKSLSLSPGK

SEQ ID NO: 2621 - protein, 448 aa, Artificial Sequence
  source: /note="Description of Artificial Sequence: Synthetic polypeptide"
EVQLVQSGAEVKKPGASVKVSCKASGYTFTSYDMHWVRQAPGQGLEWMGRIDPQSGGTKYAQKFQGRATLTVDTSTSTAYMELSRLRSDDTAVYYCARWDYGGQFDVWGQGTLVTVSSASTKGPSVFPLAPSSKSTSGGTAALGCLVKDYFPEPVTVSWNSGALTSGVHTFPAVLQSSGLYSLSSVVTVPSSSLGTQTYICNVNHKPSNTKVDKKVEPKSCDKTHTCPPCPAPEAAGGPSVFLFPPKPKDTLMISRTPEVTCVVVSVSHEDPEVKFNWYVDGVEVHNAKTKPREEQYNSTYRVVSVLTVLHQDWLNGKEYKCKVSNKALPAPIEKTISKAKGQPREPQVYTLPPSRDELTKNQVSLTCLVKGFYPSDIAVEWESNGQPENNYKTTPPVLDSDGSFFLYSKLTVDKSRWQQGNVFSCSVMHEALHNHYTQKSLSLSPGK

SEQ ID NO: 2622 - protein, 448 aa, Artificial Sequence
  source: /note="Description of Artificial Sequence: Synthetic polypeptide"
EVQLVQSGAEVKKPGASVKVSCKASGYTFTSYDMHWVRQAPGQGLEWMGRIDPISGGIKYAQKFQGRATLTVDTSTSTAYMELSRLRSDDTAVYYCARWDYGGYFDVWGQGTLVTVSSASTKGPSVFPLAPSSKSTSGGTAALGCLVKDYFPEPVTVSWNSGALTSGVHTFPAVLQSSGLYSLSSVVTVPSSSLGTQTYICNVNHKPSNTKVDKKVEPKSCDKTHTCPPCPAPEAAGGPSVFLFPPKPKDTLMISRTPEVTCVVVSVSHEDPEVKFNWYVDGVEVHNAKTKPREEQYNSTYRVVSVLTVLHQDWLNGKEYKCKVSNKALPAPIEKTISKAKGQPREPQVYTLPPSRDELTKNQVSLTCLVKGFYPSDIAVEWESNGQPENNYKTTPPVLDSDGSFFLYSKLTVDKSRWQQGNVFSCSVMHEALHNHYTQKSLSLSPGK

SEQ ID NO: 2623 - protein, 448 aa, Artificial Sequence
  source: /note="Description of Artificial Sequence: Synthetic polypeptide"
EVQLVQSGAEVKKPGASVKVSCKASGYTFTSYDMHWVRQAPGQGLEWMGRIDPQSGGTKYAQKFQGRATLTVDTSTSTAYMELSRLRSDDTAVYYCARWDYGGYFDVWGQGTLVTVSSASTKGPSVFPLAPSSKSTSGGTAALGCLVKDYFPEPVTVSWNSGALTSGVHTFPAVLQSSGLYSLSSVVTVPSSSLGTQTYICNVNHKPSNTKVDKKVEPKSCDKTHTCPPCPAPEAAGGPSVFLFPPKPKDTLMISRTPEVTCVVVSVSHEDPEVKFNWYVDGVEVHNAKTKPREEQYNSTYRVVSVLTVLHQDWLNGKEYKCKVSNKALPAPIEKTISKAKGQPREPQVYTLPPSRDELTKNQVSLTCLVKGFYPSDIAVEWESNGQPENNYKTTPPVLDSDGSFFLYSKLTVDKSRWQQGNVFSCSVMHEALHNHYTQKSLSLSPGK

SEQ ID NO: 2624 - protein, 448 aa, Artificial Sequence; identical to SEQ ID NO: 2620
  source: /note="Description of Artificial Sequence: Synthetic polypeptide"

SEQ ID NO: 2625 - protein, 448 aa, Artificial Sequence
  source: /note="Description of Artificial Sequence: Synthetic polypeptide"
EVQLVQSGAEVKKPGASVKVSCKASGYTFTSYDMHWVRQAPGQGLEWMGRIDPQSGGVKYAQKFQGRATLTVDTSTSTAYMELSRLRSDDTAVYYCARWDYGGYFDVWGQGTLVTVSSASTKGPSVFPLAPSSKSTSGGTAALGCLVKDYFPEPVTVSWNSGALTSGVHTFPAVLQSSGLYSLSSVVTVPSSSLGTQTYICNVNHKPSNTKVDKKVEPKSCDKTHTCPPCPAPEAAGGPSVFLFPPKPKDTLMISRTPEVTCVVVSVSHEDPEVKFNWYVDGVEVHNAKTKPREEQYNSTYRVVSVLTVLHQDWLNGKEYKCKVSNKALPAPIEKTISKAKGQPREPQVYTLPPSRDELTKNQVSLTCLVKGFYPSDIAVEWESNGQPENNYKTTPPVLDSDGSFFLYSKLTVDKSRWQQGNVFSCSVMHEALHNHYTQKSLSLSPGK

SEQ ID NO: 2626 - protein, 448 aa, Artificial Sequence
  source: /note="Description of Artificial Sequence: Synthetic polypeptide"
EVQLVQSGAEVKKPGASVKVSCKASGYTFTSYDMHWVRQAPGQGLEWMGRIDPQTGDIKYAQKFQGRATLTVDTSTSTAYMELSRLRSDDTAVYYCARWDYGGQFDVWGQGTLVTVSSASTKGPSVFPLAPSSKSTSGGTAALGCLVKDYFPEPVTVSWNSGALTSGVHTFPAVLQSSGLYSLSSVVTVPSSSLGTQTYICNVNHKPSNTKVDKKVEPKSCDKTHTCPPCPAPEAAGGPSVFLFPPKPKDTLMISRTPEVTCVVVSVSHEDPEVKFNWYVDGVEVHNAKTKPREEQYNSTYRVVSVLTVLHQDWLNGKEYKCKVSNKALPAPIEKTISKAKGQPREPQVYTLPPSRDELTKNQVSLTCLVKGFYPSDIAVEWESNGQPENNYKTTPPVLDSDGSFFLYSKLTVDKSRWQQGNVFSCSVMHEALHNHYTQKSLSLSPGK

SEQ ID NO: 2627 - protein, 448 aa, Artificial Sequence
  source: /note="Description of Artificial Sequence: Synthetic polypeptide"
EVQLVQSGAEVKKPGASVKVSCKASGYTFTSYDTHWVRQAPGQGLEWMGRIDPQSGGIKYAQKFQGRATLTVDTSTSTAYMELSRLRSDDTAVYYCARWDYGGYFDVWGQGTLVTVSSASTKGPSVFPLAPSSKSTSGGTAALGCLVKDYFPEPVTVSWNSGALTSGVHTFPAVLQSSGLYSLSSVVTVPSSSLGTQTYICNVNHKPSNTKVDKKVEPKSCDKTHTCPPCPAPEAAGGPSVFLFPPKPKDTLMISRTPEVTCVVVSVSHEDPEVKFNWYVDGVEVHNAKTKPREEQYNSTYRVVSVLTVLHQDWLNGKEYKCKVSNKALPAPIEKTISKAKGQPREPQVYTLPPSRDELTKNQVSLTCLVKGFYPSDIAVEWESNGQPENNYKTTPPVLDSDGSFFLYSKLTVDKSRWQQGNVFSCSVMHEALHNHYTQKSLSLSPGK

SEQ ID NO: 2628 - protein, 448 aa, Artificial Sequence
  source: /note="Description of Artificial Sequence: Synthetic polypeptide"
EVQLVQSGAEVKKPGASVKVSCKASGYTFTSYDMHWVRQAPGQGLEWMGRIDPQSGGIKYAQKFQGRATLTVDTSTSTAYMELSRLRSDDTAVYYCARWDYGGYFDVWGQGTLVTVSSASTKGPSVFPLAPSSKSTSGGTAALGCLVKDYFPEPVTVSWNSGALTSGVHTFPAVLQSSGLYSLSSVVTVPSSSLGTQTYICNVNHKPSNTKVDKKVEPKSCDKTHTCPPCPAPEAAGGPSVFLFPPKPKDTLMISRTPEVTCVVVSVSHEDPEVKFNWYVDGVEVHNAKTKPREEQYNSTYRVVSVLTVLHQDWLNGKEYKCKVSNKALPAPIEKTISKAKGQPREPQVYTLPPSRDELTKNQVSLTCLVKGFYPSDIAVEWESNGQPENNYKTTPPVLDSDGSFFLYSKLTVDKSRWQQGNVFSCSVMHEALHNHYTQKSLSLSPGK

SEQ ID NO: 2629 - protein, 448 aa, Artificial Sequence; identical to SEQ ID NO: 2628
  source: /note="Description of Artificial Sequence: Synthetic polypeptide"

SEQ ID NO: 2630 - protein, 448 aa, Artificial Sequence; identical to SEQ ID NO: 2628
  source: /note="Description of Artificial Sequence: Synthetic polypeptide"

SEQ ID NO: 2631 - protein, 448 aa, Artificial Sequence
  source: /note="Description of Artificial Sequence: Synthetic polypeptide"
EVQLVQSGAEVKKPGASVKVSCKASGYTFTSYDMHWVRQAPGQGLEWMGRIDPQSGGIKYAQKFQGRATLTVDTSTSTAYMELSRLRSDDTAVYYCARYDHGGYFDVWGQGTLVTVSSASTKGPSVFPLAPSSKSTSGGTAALGCLVKDYFPEPVTVSWNSGALTSGVHTFPAVLQSSGLYSLSSVVTVPSSSLGTQTYICNVNHKPSNTKVDKKVEPKSCDKTHTCPPCPAPEAAGGPSVFLFPPKPKDTLMISRTPEVTCVVVSVSHEDPEVKFNWYVDGVEVHNAKTKPREEQYNSTYRVVSVLTVLHQDWLNGKEYKCKVSNKALPAPIEKTISKAKGQPREPQVYTLPPSRDELTKNQVSLTCLVKGFYPSDIAVEWESNGQPENNYKTTPPVLDSDGSFFLYSKLTVDKSRWQQGNVFSCSVMHEALHNHYTQKSLSLSPGK

SEQ ID NO: 2632 - protein, 448 aa, Artificial Sequence; identical to SEQ ID NO: 2631
  source: /note="Description of Artificial Sequence: Synthetic polypeptide"

SEQ ID NO: 2633 - protein, 448 aa, Artificial Sequence
  source: /note="Description of Artificial Sequence: Synthetic polypeptide"
EVQLVQSGAEVKKPGASVKVSCKASGYTFTSYDMHWVRQAPGQGLEWMGRIDPQSGGEKYAQKFQGRATLTVDTSTSTAYMELSRLRSDDTAVYYCARYDYGGYFDVWGQGTLVTVSSASTKGPSVFPLAPSSKSTSGGTAALGCLVKDYFPEPVTVSWNSGALTSGVHTFPAVLQSSGLYSLSSVVTVPSSSLGTQTYICNVNHKPSNTKVDKKVEPKSCDKTHTCPPCPAPEAAGGPSVFLFPPKPKDTLMISRTPEVTCVVVSVSHEDPEVKFNWYVDGVEVHNAKTKPREEQYNSTYRVVSVLTVLHQDWLNGKEYKCKVSNKALPAPIEKTISKAKGQPREPQVYTLPPSRDELTKNQVSLTCLVKGFYPSDIAVEWESNGQPENNYKTTPPVLDSDGSFFLYSKLTVDKSRWQQGNVFSCSVMHEALHNHYTQKSLSLSPGK

SEQ ID NO: 2634 - protein, 107 aa, Artificial Sequence; identical to SEQ ID NO: 688
  source: /note="Description of Artificial Sequence: Synthetic polypeptide"

SEQ ID NO: 2635 - protein, 214 aa, Artificial Sequence
  source: /note="Description of Artificial Sequence: Synthetic polypeptide"
DIQMTQSPSSLSASVGDRVTITCRASQDIYSYLNWYQQKPGKAVKLLIYYTSNLETGVPSRFSGSGSGTDYTLTISSLQPEDFATYFCQQGDTLPWTFGQGTKLEIKRTVAAPSVFIFPPSDEQLKSGTASVVCLLNNFYPREAKVQWKVDNALQSGNSQESVTEQDSKDSTYSLSSTLTLSKADYEKHKVYACEVTHQGLSSPVTKSFNRGEC

SEQ ID NO: 2636 - protein, 214 aa, Artificial Sequence
  source: /note="Description of Artificial Sequence: Synthetic polypeptide"
DIQMTQSPSSLSASVGDRVTITCRASQDIYNYLNWYQQKPGKAVKLLIYYTSGLETGVPSRFSGSGSGTDYTLTISSLQPEDFATYFCQQGDTLPWTFGQGTKLEIKRTVAAPSVFIFPPSDEQLKSGTASVVCLLNNFYPREAKVQWKVDNALQSGNSQESVTEQDSKDSTYSLSSTLTLSKADYEKHKVYACEVTHQGLSSPVTKSFNRGEC

SEQ ID NO: 2637 - protein, 214 aa, Artificial Sequence
  source: /note="Description of Artificial Sequence: Synthetic polypeptide"
DIQMTQSPSSLSASVGDRVTITCRASQDIFNYLNWYQQKPGKAVKLLIYYTSHLETGVPSRFSGSGSGTDYTLTISSLQPEDFATYFCQQGDTLPWTFGQGTKLEIKRTVAAPSVFIFPPSDEQLKSGTASVVCLLNNFYPREAKVQWKVDNALQSGNSQESVTEQDSKDSTYSLSSTLTLSKADYEKHKVYACEVTHQGLSSPVTKSFNRGEC

SEQ ID NO: 2638 - protein, 214 aa, Artificial Sequence
  source: /note="Description of Artificial Sequence: Synthetic polypeptide"
DIQMTQSPSSLSASVGDRVTITCRASQDIYNYLNWYQQKPGKAVKLLIYYTSVLETGVPSRFSGSGSGTDYTLTISSLQPEDFATYFCQQGDTLPWTFGQGTKLEIKRTVAAPSVFIFPPSDEQLKSGTASVVCLLNNFYPREAKVQWKVDNALQSGNSQESVTEQDSKDSTYSLSSTLTLSKADYEKHKVYACEVTHQGLSSPVTKSFNRGEC

SEQ ID NO: 2639 - protein, 214 aa, Artificial Sequence; identical to SEQ ID NO: 2638
  source: /note="Description of Artificial Sequence: Synthetic polypeptide"

SEQ ID NO: 2640 - protein, 214 aa, Artificial Sequence
  source: /note="Description of Artificial Sequence: Synthetic polypeptide"
DIQMTQSPSSLSASVGDRVTITCRASQDIYNYLNWYQQKPGKAVKLLIYYTSVLETGVPSRFSGSGSGTDYTLTISSLQPEDFATYFCQQGDELPWTFGQGTKLEIKRTVAAPSVFIFPPSDEQLKSGTASVVCLLNNFYPREAKVQWKVDNALQSGNSQESVTEQDSKDSTYSLSSTLTLSKADYEKHKVYACEVTHQGLSSPVTKSFNRGEC

SEQ ID NO: 2641 - protein, 214 aa, Artificial Sequence; identical to SEQ ID NO: 2636
  source: /note="Description of Artificial Sequence: Synthetic polypeptide"

SEQ ID NO: 2642 - protein, 214 aa, Artificial Sequence
  source: /note="Description of Artificial Sequence: Synthetic polypeptide"
DIQMTQSPSSLSASVGDRVTITCRASQDIYNYLNWYQQKPGKAVKLLIYYTSYLETGVPSRFSGSGSGTDYTLTISSLQPEDFATYFCQQGDTLPWTFGQGTKLEIKRTVAAPSVFIFPPSDEQLKSGTASVVCLLNNFYPREAKVQWKVDNALQSGNSQESVTEQDSKDSTYSLSSTLTLSKADYEKHKVYACEVTHQGLSSPVTKSFNRGEC

SEQ ID NO: 2643 - protein, 214 aa, Artificial Sequence
  source: /note="Description of Artificial Sequence: Synthetic polypeptide"
DIQMTQSPSSLSASVGDRVTITCRASQDIYNYLNWYQQKPGKAVKLLIYYTSRLETGVPSRFSGSGSGTDYTLTISSLQPEDFATYFCQQGDTLPWTFGQGTKLEIKRTVAAPSVFIFPPSDEQLKSGTASVVCLLNNFYPREAKVQWKVDNALQSGNSQESVTEQDSKDSTYSLSSTLTLSKADYEKHKVYACEVTHQGLSSPVTKSFNRGEC

SEQ ID NO: 2644 - protein, 214 aa, Artificial Sequence; identical to SEQ ID NO: 2638
  source: /note="Description of Artificial Sequence: Synthetic polypeptide"

SEQ ID NO: 2645 - protein, 214 aa, Artificial Sequence
  source: /note="Description of Artificial Sequence: Synthetic polypeptide"
DIQMTQSPSSLSASVGDRVTITCRASQDIYNYLNWYQQKPGKAVKLLIYYTSRLETGVPSRFSGSGSGTDYTLTISSLQPEDFATYFCQQGDELPWTFGQGTKLEIKRTVAAPSVFIFPPSDEQLKSGTASVVCLLNNFYPREAKVQWKVDNALQSGNSQESVTEQDSKDSTYSLSSTLTLSKADYEKHKVYACEVTHQGLSSPVTKSFNRGEC

SEQ ID NO: 2646 - protein, 214 aa, Artificial Sequence; identical to SEQ ID NO: 2643
  source: /note="Description of Artificial Sequence: Synthetic polypeptide"

SEQ ID NO: 2647 - protein, 214 aa, Artificial Sequence; identical to SEQ ID NO: 2642
  source: /note="Description of Artificial Sequence: Synthetic polypeptide"

SEQ ID NO: 2648 - protein, 214 aa, Artificial Sequence; identical to SEQ ID NO: 2643
  source: /note="Description of Artificial Sequence: Synthetic polypeptide"

SEQ ID NO: 2649 - protein, 5 aa, Artificial Sequence
  source: /note="Description of Artificial Sequence: Synthetic peptide"
PVGVV

SEQ ID NO: 2650 - protein, 107 aa, Artificial Sequence
  source: /note="Description of Artificial Sequence: Synthetic polypeptide"
DIQMTQTTSSLSASLGDRVTISCRASQDITNYLNWYQQKPDGAVKLLIYYTSRLHSGVPSRFSGSGSGTDYSLTISNLEQEDIATYFCQQGDTLPWTFGGGTKLEIK

SEQ ID NO: 2651 - protein, 107 aa, Artificial Sequence
  source: /note="Description of Artificial Sequence: Synthetic polypeptide"
DIQMTQSPSSLSASVGDRVTITCQASQDISNYLNWYQQKPGKAPKLLIYDASNLETGVPSRFSGSGSGTDFTFTISSLQPEDIATYYCQQYDNLPCTFGQGTKLEIK

SEQ ID NO: 2652 - protein, 118 aa, Artificial Sequence
  source: /note="Description of Artificial Sequence: Synthetic polypeptide"
EVQLQQPGAELVKPGASVKLSCKASGYTFTSYWMHWVKQRPGRGLEWIGRIDPQSGGIKYNEKFKSKATLTVDKSSSTAYMQLSSLTSEDSAVYYCARWDYGGYFDVWGTGTTVTVSS

SEQ ID NO: 2653 - protein, 113 aa, Artificial Sequence
  source: /note="Description of Artificial Sequence: Synthetic polypeptide"
QVQLVQSGAEVKKPGASVKVSCKASGYTFTGYYMHWVRQAPGQGLEWMGRINPNSGGTNYAQKFQGRVTMTRDTSISTAYMELSRLRSDDTVVYYCARYFDYWGQGTLVTVSS

1. An isolated antibody or antigen binding fragment thereof which specifically binds to LAP comprising: a heavy chain variable region comprising CDR1, CDR2, and CDR3 regions comprising the amino acid sequences of SEQ ID NOs: 2218, 2219, and 2220, respectively, and/or a light chain variable region comprising CDR1, CDR2, and CDR3 regions comprising the amino acid sequences of SEQ ID NOs: 2222, 2223, and 2224, respectively.

2. An isolated antibody or antigen binding fragment thereof which specifically binds to LAP comprising:
(a) a heavy chain variable region comprising CDR1, CDR2, and CDR3 regions comprising the amino acid sequences of SEQ ID NOs: 1285, 1286, and 1287, respectively, and/or a light chain variable region comprising CDR1, CDR2, and CDR3 regions comprising the amino acid sequences of SEQ ID NOs: 1289, 1290, and 1291, respectively;
(b) a heavy chain variable region comprising CDR1, CDR2, and CDR3 regions comprising the amino acid sequences of SEQ ID NOs: 1277, 1278, and 1279, respectively, and/or a light chain variable region comprising CDR1, CDR2, and CDR3 regions comprising the amino acid sequences of SEQ ID NOs: 1281, 1282, and 1283, respectively;
(c) a heavy chain variable region comprising CDR1, CDR2, and CDR3 regions comprising the amino acid sequences of SEQ ID NOs: 1269, 1270, and 1271, respectively, and/or a light chain variable region comprising CDR1, CDR2, and CDR3 regions comprising the amino acid sequences of SEQ ID NOs: 1273, 1274, and 1275, respectively;
(d) a heavy chain variable region comprising CDR1, CDR2, and CDR3 regions comprising the amino acid sequences of SEQ ID NOs: 1261, 1262, and 1263, respectively, and/or a light chain variable region comprising CDR1, CDR2, and CDR3 regions comprising the amino acid sequences of SEQ ID NOs: 1265, 1266, and 1267, respectively;
(e) a heavy chain variable region comprising CDR1, CDR2, and CDR3 regions comprising the amino acid sequences of SEQ ID NOs: 1253, 1254, and 1255, respectively, and/or a light chain variable region comprising CDR1, CDR2, and CDR3 regions comprising the amino acid sequences of SEQ ID NOs: 1257, 1258, and 1259, respectively;
(f) a heavy chain variable region comprising CDR1, CDR2, and CDR3 regions comprising the amino acid sequences of SEQ ID NOs: 1245, 1246, and 1247, respectively, and/or a light chain variable region comprising CDR1, CDR2, and CDR3 regions comprising the amino acid sequences of SEQ ID NOs: 1249, 1250, and 1251, respectively;
(g) a heavy chain variable region comprising CDR1, CDR2, and CDR3 regions comprising the amino acid sequences of SEQ ID NOs: 1237, 1238, and 1239, respectively, and/or a light chain variable region comprising CDR1, CDR2, and CDR3 regions comprising the amino acid sequences of SEQ ID NOs: 1241, 1242, and 1243, respectively
(h) a heavy chain variable region comprising CDR1, CDR2, and CDR3 regions comprising the amino acid sequences of SEQ ID NOs: 1229, 1230, and 1231, respectively, and/or a light chain variable region comprising CDR1, CDR2, and CDR3 regions comprising the amino acid sequences of SEQ ID NOs: 1233, 1234, and 1235, respectively;
(i) a heavy chain variable region comprising CDR1, CDR2, and CDR3 regions comprising the amino acid sequences of SEQ ID NOs: 1221, 1222, and 1223, respectively, and/or a light chain variable region comprising CDR1, CDR2, and CDR3 regions comprising the amino acid sequences of SEQ ID NOs: 1225, 1226, and 1227, respectively;
(j) a heavy chain variable region comprising CDR1, CDR2, and CDR3 regions comprising the amino acid sequences of SEQ ID NOs: 1213, 1214, and 1215, respectively, and/or a light chain variable region comprising CDR1, CDR2, and CDR3 regions comprising the amino acid sequences of SEQ ID NOs: 1217, 1218, and 1219, respectively;
(k) a heavy chain variable region comprising CDR1, CDR2, and CDR3 regions comprising the amino acid sequences of SEQ ID NOs: 95, 96, and 97, respectively, and/or a light chain variable region comprising CDR1, CDR2, and CDR3 regions comprising the amino acid sequences of SEQ ID NOs: 100, 101, and 102, respectively;
(1) a heavy chain variable region comprising CDR1, CDR2, and CDR3 regions comprising the amino acid sequences of SEQ ID NOs: 105, 106, and 107, respectively, and/or a light chain variable region comprising CDR1, CDR2, and CDR3 regions comprising the amino acid sequences of SEQ ID NOs: 110, 111, and 112, respectively;
(m) a heavy chain variable region comprising CDR1, CDR2, and CDR3 regions comprising the amino acid sequences of SEQ ID NOs: 115, 116, and 117, respectively, and/or a light chain variable region comprising CDR1, CDR2, and CDR3 regions comprising the amino acid sequences of SEQ ID NOs: 120, 121, and 122, respectively;
(n) a heavy chain variable region comprising CDR1, CDR2, and CDR3 regions comprising the amino acid sequences of SEQ ID NOs: 125, 126, and 127, respectively, and/or a light chain variable region comprising CDR1, CDR2, and CDR3 regions comprising the amino acid sequences of SEQ ID NOs:130, 131, and 132, respectively;
(o) a heavy chain variable region comprising CDR1, CDR2, and CDR3 regions comprising the amino acid sequences of SEQ ID NOs: 135, 136, and 137, respectively, and/or a light chain variable region comprising CDR1, CDR2, and CDR3 regions comprising the amino acid sequences of SEQ ID NOs: 140, 141, and 142, respectively;
(p) a heavy chain variable region comprising CDR1, CDR2, and CDR3 regions comprising the amino acid sequences of SEQ ID NOs: 145, 146, and 147, respectively, and/or a light chain variable region comprising CDR1, CDR2, and CDR3 regions comprising the amino acid sequences of SEQ ID NOs: 150, 151, and 152, respectively;
(q) a heavy chain variable region comprising CDR1, CDR2, and CDR3 regions comprising the amino acid sequences of SEQ ID NOs: 155, 156, and 157, respectively, and/or a light chain variable region comprising CDR1, CDR2, and CDR3 regions comprising the amino acid sequences of SEQ ID NOs: 160, 161, and 162, respectively;
(r) a heavy chain variable region comprising CDR1, CDR2, and CDR3 regions comprising the amino acid sequences of SEQ ID NOs: 165, 166, and 167, respectively, and/or a light chain variable region comprising CDR1, CDR2, and CDR3 regions comprising the amino acid sequences of SEQ ID NOs: 170, 171, and 172, respectively;
(s) a heavy chain variable region comprising CDR1, CDR2, and CDR3 regions comprising the amino acid sequences of SEQ ID NOs: 175, 176, and 177, respectively, and/or a light chain variable region comprising CDR1, CDR2, and CDR3 regions comprising the amino acid sequences of SEQ ID NOs: 180, 181, and 182, respectively;
(t) a heavy chain variable region comprising CDR1, CDR2, and CDR3 regions comprising the amino acid sequences of SEQ ID NOs: 185, 186, and 187, respectively, and/or a light chain variable region comprising CDR1, CDR2, and CDR3 regions comprising the amino acid sequences of SEQ ID NOs: 190, 191, and 192, respectively;
(u) a heavy chain variable region comprising CDR1, CDR2, and CDR3 regions comprising the amino acid sequences of SEQ ID NOs: 195, 196, and 197, respectively, and/or a light chain variable region comprising CDR1, CDR2, and CDR3 regions comprising the amino acid sequences of SEQ ID NOs: 200, 201, and 202, respectively;
(v) a heavy chain variable region comprising CDR1, CDR2, and CDR3 regions comprising the amino acid sequences of SEQ ID NOs: 205, 206, and 207, respectively, and/or a light chain variable region comprising CDR1, CDR2, and CDR3 regions comprising the amino acid sequences of SEQ ID NOs: 210, 211, and 212, respectively;
(w) a heavy chain variable region comprising CDR1, CDR2, and CDR3 regions comprising the amino acid sequences of SEQ ID NOs: 215, 216, and 217, respectively, and/or a light chain variable region comprising CDR1, CDR2, and CDR3 regions comprising the amino acid sequences of SEQ ID NOs: 220, 221, and 222, respectively;
(x) a heavy chain variable region comprising CDR1, CDR2, and CDR3 regions comprising the amino acid sequences of SEQ ID NOs: 225, 226, and 227, respectively, and/or a light chain variable region comprising CDR1, CDR2, and CDR3 regions comprising the amino acid sequences of SEQ ID NOs: 230, 231, and 232, respectively;
(y) a heavy chain variable region comprising CDR1, CDR2, and CDR3 regions comprising the amino acid sequences of SEQ ID NOs: 235, 236, and 237, respectively, and/or a light chain variable region comprising CDR1, CDR2, and CDR3 regions comprising the amino acid sequences of SEQ ID NOs: 240, 241, and 242, respectively;
(z) a heavy chain variable region comprising CDR1, CDR2, and CDR3 regions comprising the amino acid sequences of SEQ ID NOs: 245, 246, and 247, respectively, and/or a light chain variable region comprising CDR1, CDR2, and CDR3 regions comprising the amino acid sequences of SEQ ID NOs: 250, 251, and 252, respectively;
(aa) a heavy chain variable region comprising CDR1, CDR2, and CDR3 regions comprising the amino acid sequences of SEQ ID NOs: 255, 256, and 257, respectively, and/or a light chain variable region comprising CDR1, CDR2, and CDR3 regions comprising the amino acid sequences of SEQ ID NOs: 260, 261, and 262, respectively;
(bb) a heavy chain variable region comprising CDR1, CDR2, and CDR3 regions comprising the amino acid sequences of SEQ ID NOs: 265, 266, and 267, respectively, and/or a light chain variable region comprising CDR1, CDR2, and CDR3 regions comprising the amino acid sequences of SEQ ID NOs: 270, 271, and 272, respectively;
(cc) a heavy chain variable region comprising CDR1, CDR2, and CDR3 regions comprising the amino acid sequences of SEQ ID NOs: 275, 276, and 277, respectively, and/or a light chain variable region comprising CDR1, CDR2, and CDR3 regions comprising the amino acid sequences of SEQ ID NOs: 280, 281, and 282, respectively;
(dd) a heavy chain variable region comprising CDR1, CDR2, and CDR3 regions comprising the amino acid sequences of SEQ ID NOs: 285, 286, and 287, respectively, and/or a light chain variable region comprising CDR1, CDR2, and CDR3 regions comprising the amino acid sequences of SEQ ID NOs: 290, 291, and 292, respectively;
(ee) a heavy chain variable region comprising CDR1, CDR2, and CDR3 regions comprising the amino acid sequences of SEQ ID NOs: 295, 296, and 297, respectively, and/or a light chain variable region comprising CDR1, CDR2, and CDR3 regions comprising the amino acid sequences of SEQ ID NOs: 300, 301, and 302, respectively;
(ff) a heavy chain variable region comprising CDR1, CDR2, and CDR3 regions comprising the amino acid sequences of SEQ ID NOs: 305, 306, and 307, respectively, and/or a light chain variable region comprising CDR1, CDR2, and CDR3 regions comprising the amino acid sequences of SEQ ID NOs: 310, 311, and 312, respectively;
(gg) a heavy chain variable region comprising CDR1, CDR2, and CDR3 regions comprising the amino acid sequences of SEQ ID NOs: 315, 316, and 317, respectively, and/or a light chain variable region comprising CDR1, CDR2, and CDR3 regions comprising the amino acid sequences of SEQ ID NOs: 320, 321, and 322, respectively;
(hh) a heavy chain variable region comprising CDR1, CDR2, and CDR3 regions comprising the amino acid sequences of SEQ ID NOs: 325, 326, and 327, respectively, and/or a light chain variable region comprising CDR1, CDR2, and CDR3 regions comprising the amino acid sequences of SEQ ID NOs: 330, 331, and 332, respectively;
(ii) a heavy chain variable region comprising CDR1, CDR2, and CDR3 regions comprising the amino acid sequences of SEQ ID NOs: 335, 336, and 337, respectively, and/or a light chain variable region comprising CDR1, CDR2, and CDR3 regions comprising the amino acid sequences of SEQ ID NOs: 340, 341, and 342, respectively;
(jj) a heavy chain variable region comprising CDR1, CDR2, and CDR3 regions comprising the amino acid sequences of SEQ ID NOs: 345, 346, and 347, respectively, and/or a light chain variable region comprising CDR1, CDR2, and CDR3 regions comprising the amino acid sequences of SEQ ID NOs: 350, 351, and 352, respectively;
(kk) a heavy chain variable region comprising CDR1, CDR2, and CDR3 regions comprising the amino acid sequences of SEQ ID NOs: 355, 356, and 357, respectively, and/or a light chain variable region comprising CDR1, CDR2, and CDR3 regions comprising the amino acid sequences of SEQ ID NOs: 360, 361, and 362, respectively;
(ll) a heavy chain variable region comprising CDR1, CDR2, and CDR3 regions comprising the amino acid sequences of SEQ ID NOs: 365, 366, and 367, respectively, and/or a light chain variable region comprising CDR1, CDR2, and CDR3 regions comprising the amino acid sequences of SEQ ID NOs: 370, 371, and 372, respectively;
(mm) a heavy chain variable region comprising CDR1, CDR2, and CDR3 regions comprising the amino acid sequences of SEQ ID NOs: 375, 376, and 377, respectively, and/or a light chain variable region comprising CDR1, CDR2, and CDR3 regions comprising the amino acid sequences of SEQ ID NOs: 380, 381, and 382, respectively;
(nn) a heavy chain variable region comprising CDR1, CDR2, and CDR3 regions comprising the amino acid sequences of SEQ ID NOs: 385, 386, and 387, respectively, and/or a light chain variable region comprising CDR1, CDR2, and CDR3 regions comprising the amino acid sequences of SEQ ID NOs: 390, 391, and 392, respectively;
(oo) a heavy chain variable region comprising CDR1, CDR2, and CDR3 regions comprising the amino acid sequences of SEQ ID NOs: 395, 396, and 397, respectively, and/or a light chain variable region comprising CDR1, CDR2, and CDR3 regions comprising the amino acid sequences of SEQ ID NOs: 400, 401, and 402, respectively;
(pp) a heavy chain variable region comprising CDR1, CDR2, and CDR3 regions comprising the amino acid sequences of SEQ ID NOs: 405, 406, and 407, respectively, and/or a light chain variable region comprising CDR1, CDR2, and CDR3 regions comprising the amino acid sequences of SEQ ID NOs: 410, 411, and 412, respectively;
(qq) a heavy chain variable region comprising CDR1, CDR2, and CDR3 regions comprising the amino acid sequences of SEQ ID NOs: 415, 416, and 417, respectively, and/or a light chain variable region comprising CDR1, CDR2, and CDR3 regions comprising the amino acid sequences of SEQ ID NOs: 420, 421, and 422, respectively;
(rr) a heavy chain variable region comprising CDR1, CDR2, and CDR3 regions comprising the amino acid sequences of SEQ ID NOs: 425, 426, and 427, respectively, and/or a light chain variable region comprising CDR1, CDR2, and CDR3 regions comprising the amino acid sequences of SEQ ID NOs: 430, 431, and 432, respectively;
(ss) a heavy chain variable region comprising CDR1, CDR2, and CDR3 regions comprising the amino acid sequences of SEQ ID NOs: 435, 436, and 437, respectively, and/or a light chain variable region comprising CDR1, CDR2, and CDR3 regions comprising the amino acid sequences of SEQ ID NOs: 440, 441, and 442, respectively;
(tt) a heavy chain variable region comprising CDR1, CDR2, and CDR3 regions comprising the amino acid sequences of SEQ ID NOs: 455, 456, and 457, respectively, and/or a light chain variable region comprising CDR1, CDR2, and CDR3 regions comprising the amino acid sequences of SEQ ID NOs: 460, 461, and 462, respectively;
(uu) a heavy chain variable region comprising CDR1, CDR2, and CDR3 regions comprising the amino acid sequences of SEQ ID NOs: 465, 466, and 467, respectively, and/or a light chain variable region comprising CDR1, CDR2, and CDR3 regions comprising the amino acid sequences of SEQ ID NOs: 470, 471, and 472, respectively;
(vv) a heavy chain variable region comprising CDR1, CDR2, and CDR3 regions comprising the amino acid sequences of SEQ ID NOs: 475, 476, and 477, respectively, and/or a light chain variable region comprising CDR1, CDR2, and CDR3 regions comprising the amino acid sequences of SEQ ID NOs: 480, 481, and 482, respectively;
(ww) a heavy chain variable region comprising CDR1, CDR2, and CDR3 regions comprising the amino acid sequences of SEQ ID NOs: 485, 486, and 487, respectively, and/or a light chain variable region comprising CDR1, CDR2, and CDR3 regions comprising the amino acid sequences of SEQ ID NOs: 490, 491, and 492, respectively;
(xx) a heavy chain variable region comprising CDR1, CDR2, and CDR3 regions comprising the amino acid sequences of SEQ ID NOs: 495, 496, and 497, respectively, and/or a light chain variable region comprising CDR1, CDR2, and CDR3 regions comprising the amino acid sequences of SEQ ID NOs: 500, 501, and 502, respectively;
(yy) a heavy chain variable region comprising CDR1, CDR2, and CDR3 regions comprising the amino acid sequences of SEQ ID NOs: 505, 506, and 507, respectively, and/or a light chain variable region comprising CDR1, CDR2, and CDR3 regions comprising the amino acid sequences of SEQ ID NOs: 510, 511, and 512, respectively;
(zz) a heavy chain variable region comprising CDR1, CDR2, and CDR3 regions comprising the amino acid sequences of SEQ ID NOs: 515, 516, and 517, respectively, and/or a light chain variable region comprising CDR1, CDR2, and CDR3 regions comprising the amino acid sequences of SEQ ID NOs: 520, 521, and 522, respectively;
(aaa) a heavy chain variable region comprising CDR1, CDR2, and CDR3 regions comprising the amino acid sequences of SEQ ID NOs: 525, 526, and 527, respectively, and/or a light chain variable region comprising CDR1, CDR2, and CDR3 regions comprising the amino acid sequences of SEQ ID NOs: 530, 531, and 532, respectively;
(bbb) heavy chain variable region comprising CDR1, CDR2, and CDR3 regions comprising the amino acid sequences of SEQ ID NOs: 535, 536, and 537, respectively, and/or a light chain variable region comprising CDR1, CDR2, and CDR3 regions comprising the amino acid sequences of SEQ ID NOs: 540, 541, and 542, respectively;
(ccc) a heavy chain variable region comprising CDR1, CDR2, and CDR3 regions comprising the amino acid sequences of SEQ ID NOs: 545, 546, and 547, respectively, and/or a light chain variable region comprising CDR1, CDR2, and CDR3 regions comprising the amino acid sequences of SEQ ID NOs: 550, 551, and 552, respectively;
(ddd) a heavy chain variable region comprising CDR1, CDR2, and CDR3 regions comprising the amino acid sequences of SEQ ID NOs: 555, 556, and 557, respectively, and/or a light chain variable region comprising CDR1, CDR2, and CDR3 regions comprising the amino acid sequences of SEQ ID NOs: 560, 561, and 562, respectively;
(eee) a heavy chain variable region comprising CDR1, CDR2, and CDR3 regions comprising the amino acid sequences of SEQ ID NOs: 565, 566, and 567, respectively, and/or a light chain variable region comprising CDR1, CDR2, and CDR3 regions comprising the amino acid sequences of SEQ ID NOs: 570, 571, and 572, respectively;
(fff) a heavy chain variable region comprising CDR1, CDR2, and CDR3 regions comprising the amino acid sequences of SEQ ID NOs: 43, 44, and 45, respectively;
(ggg) a heavy chain variable region comprising CDR1, CDR2, and CDR3 regions comprising the amino acid sequences of SEQ ID NOs: 48, 49, and 50, respectively;
(hhh) a heavy chain variable region comprising CDR1, CDR2, and CDR3 regions comprising the amino acid sequences of SEQ ID NOs: 53, 54, and 55, respectively;
(iii) a heavy chain variable region comprising CDR1, CDR2, and CDR3 regions comprising the amino acid sequences of SEQ ID NOs: 58, 59, and 60, respectively;
(jjj) a heavy chain variable region comprising CDR1, CDR2, and CDR3 regions comprising the amino acid sequences of SEQ ID NOs: 63, 64, and 65, respectively;
(kkk) a heavy chain variable region comprising CDR1, CDR2, and CDR3 regions comprising the amino acid sequences of SEQ ID NOs: 68, 69, and 70, respectively;
(lll) a heavy chain variable region comprising CDR1, CDR2, and CDR3 regions comprising the amino acid sequences of SEQ ID NOs: 73, 74, and 75, respectively;
(mmm) a heavy chain variable region comprising CDR1, CDR2, and CDR3 regions comprising the amino acid sequences of SEQ ID NOs: 78, 79, and 80, respectively;
(nnn) a heavy chain variable region comprising CDR1, CDR2, and CDR3 regions comprising the amino acid sequences of SEQ ID NOs: 83, 84, and 85, respectively;
(ooo) a heavy chain variable region comprising CDR1, CDR2, and CDR3 regions comprising the amino acid sequences of SEQ ID NOs: 88, 89, and 90, respectively;
(ppp) a light chain variable region comprising CDR1, CDR2, and CDR3 regions comprising the amino acid sequences of SEQ ID NOs: 8, 9, and 10, respectively;
(qqq) a light chain variable region comprising CDR1, CDR2, and CDR3 regions comprising the amino acid sequences of SEQ ID NOs: 13, 14, and 15, respectively;
(rrr) a light chain variable region comprising CDR1, CDR2, and CDR3 regions comprising the amino acid sequences of SEQ ID NOs: 18, 19, and 20, respectively;
(sss) a light chain variable region comprising CDR1, CDR2, and CDR3 regions comprising the amino acid sequences of SEQ ID NOs: 23, 24, and 25, respectively;
(ttt) a light chain variable region comprising CDR1, CDR2, and CDR3 regions comprising the amino acid sequences of SEQ ID NOs: 28, 29, and 30, respectively;
(uuu) a light chain variable region comprising CDR1, CDR2, and CDR3 regions comprising the amino acid sequences of SEQ ID NOs: 33, 34, and 35, respectively;
(vvv) a light chain variable region comprising CDR1, CDR2, and CDR3 regions comprising the amino acid sequences of SEQ ID NOs: 38, 39, and 40, respectively; or
(zzz) a heavy chain variable region comprising CDR1, CDR2, and CDR3 regions comprising CDR1, CDR2, and CDR3 amino acid sequences selected from the group of sequences set forth in Table 41, Table 42, Table 43 and/or Table 45A, respectively, and/or a light chain variable region comprising CDR1, CDR2, and CDR3 regions comprising CDR1, CDR2, and CDR3 amino acid sequences selected from the group of sequences set forth in Table 41, Table 42, Table 43 and/or Table 45A, respectively.

3. The antibody or antigen binding fragment thereof of claim 1 which comprises a heavy chain variable region sequence comprising an amino acid sequence selected from the group consisting of SEQ ID NOs: 575-622, 661-685, 712-756, 794-827, 849-893; 921-950, 971-1009, 1037-1067, 1089-1113, 1138-1179, and 2589-2603; or a heavy chain variable region sequence which is at least 85%, 90%, 95%, 98%, or 99% identical to an amino acid sequence selected from the group consisting of SEQ ID NOs: 575-622, 661-685, 712-756, 794-827, 849-893: 921-950, 971-1009, 1037-1067, 1089-1113, 1138-1179, and 2589-2603.

4. (canceled)

5. The antibody or antigen binding fragment thereof of claim 1, which comprises a light chain variable region sequence selected from the group consisting of SEQ ID NOs: 623-660; 686-711, 757-793; 828-848, 894-920, 951-970, 1010-1036, 1068-1088, 1114-1137, and 1180-1211; or a light chain variable region sequence which is at least 85%, 90%, 95%, 98%, or 99% identical to an amino acid sequence selected from the group consisting of SEQ ID NOs: 623-660: 686-711, 757-793: 828-848, 894-920, 951-970, 1010-1036, 1068-1088, 1114-1137, and 1180-1211.

6. (canceled)

7. The antibody or antigen binding fragment thereof of claim 2 which comprises a heavy chain variable region sequence comprising an amino acid sequence selected from the group consisting of SEQ ID NOs: 98, 108, 118, 128, 138, 148, 158, 168, 178, 188, 198, 208, 218, 228, 238, 248, 258, 268, 278, 288, 298, 308, 318, 328, 338, 348, 358, 368, 378, 388, 398, 408, 418, 428, 438, 458, 468, 478, 488, 498, 508, 518, 528, 538, 548, 558, and 568; or a heavy chain variable region sequence which is at least 85%, 90%, 95%, 98%, or 99% identical to the amino acid sequence selected from the group consisting of SEQ ID NOs: 98, 108, 118, 128, 138, 148, 158, 168, 178, 188, 198, 208, 218, 228, 238, 248, 258, 268, 278, 288, 298, 308, 318, 328, 338, 348, 358, 368, 378, 388, 398, 408, 418, 428, 438, 458, 468, 478, 488, 498, 508, 518, 528, 538, 548, 558, and 568.

8. (canceled)

9. The antibody or antigen binding fragment thereof of claim 3, which comprises a light chain variable region sequence comprising the amino acid sequence selected from the group consisting of SEQ ID NOs: 103, 113, 123, 133, 143, 153, 163, 173, 183, 193, 203, 213, 223, 233, 243, 253, 263, 273, 283, 293, 303, 313, 323, 333, 343, 353, 363, 373, 383, 393, 403, 413, 423, 433, 443, 463, 473, 483, 493, 503, 513, 523, 533, 543, 553, 563, and 573; or a light chain variable region sequence which is at least 85%, 90%, 95%, 98%, or 99% identical to the amino acid sequence selected from the group consisting of SEQ ID NOs: 103, 113, 123, 133, 143, 153, 163, 173, 183, 193, 203, 213, 223, 233, 243, 253, 263, 273, 283, 293, 303, 313, 323, 333, 343, 353, 363, 373, 383, 393, 403, 413, 423, 433, 443, 463, 473, 483, 493, 503, 513, 523, 533, 543, 553, 563, and 573.

10-12. (canceled)

13. The antibody or antigen binding fragment thereof of claim 2 which comprises a heavy chain variable region sequence comprising an amino acid sequence selected from the group consisting of SEQ ID NOs: 46, 51, 56, 61, 66, 71, 76, 81, 86, and 91; or comprises a heavy chain variable region sequence which is at least 85%, 90%, 95%, 98%, or 99% identical to an amino acid sequence selected from the group consisting of SEQ ID NOs: 46, 51, 56, 61, 66, 71, 76, 81, 86, and 91.

14. The antibody or antigen binding fragment thereof of claim 2, which comprises a light chain variable region sequence comprising an amino acid sequence selected from the group consisting of SEQ ID NOs: 11, 16, 21, 26, 31, 36, and 41; or comprises a light chain variable region sequence which is at least 85%, 90%, 95%, 98%, or 99% identical to an amino acid sequence selected from the group consisting of SEQ ID NOs: 11, 16, 21, 26, 31, 36, and 41.

15. The antibody or antigen binding fragment thereof of claim 1 which comprises a heavy chain variable region sequence comprising the amino acid sequence selected from the group consisting of SEQ ID NO: 1212, 1220, 1228, 1236, 1244, 1252, 1260, 1268, 1276, 1284, 1295, 1305, 1315, 1325, 1335, 1345, 1355, 1365, 1375, and 2217; or comprises a heavy chain variable region sequence which is at least 85%, 90%, 95%, 98%, or 99% identical to the amino acid sequence selected from the group consisting of SEQ ID NO: 1212, 1220, 1228, 1236, 1244, 1252, 1260, 1268, 1276, 1284, 1295, 1305, 1315, 1325, 1335, 1345, 1355, 1365, 1375, and 2217.

16. The antibody or antigen binding fragment thereof of claim 1, which comprises a light chain variable region sequence comprising the amino acid sequence selected from the group consisting of SEQ ID NO: 1216, 1224, 1232, 1240, 1248, 1256, 1264, 1272, 1280, 1288, 1300, 1310, 1320, 1330, 1340, 1350, 1360, 1370, 1380, 2221; or comprises a light chain variable region sequence which is at least 85%, 90%, 95%, 98%, or 99% identical to the amino acid sequence selected from the group consisting of SEQ ID NO: 1216, 1224, 1232, 1240, 1248, 1256, 1264, 1272, 1280, 1288, 1300, 1310, 1320, 1330, 1340, 1350, 1360, 1370, 1380, 2221.

17-52. (canceled)

53. The antibody or antigen binding fragment thereof of claim 1 which comprises a heavy chain variable region sequence comprising an amino acid sequence described in Table 42, Table 43; or Table 45B or comprises a heavy chain variable region sequence which is at least 85%, 90%, 95%, 98%, or 99% identical to an amino acid sequence described in Table 42.

54. The antibody or antigen binding fragment thereof of claim 1, which comprises a light chain variable region sequence comprising an amino acid sequence described in Table 42, Table 43; or Table 45B or comprises a light chain variable region sequence which is at least 85%, 90%, 95%, 98%, or 99% identical to an amino acid sequence described in Table 42 or Table 43.

55. The antibody or antigen binding fragment thereof of claim 1 which comprises a heavy chain variable region sequence comprising the amino acid sequence selected from the group consisting of SEQ ID NO: 1385, 1395, 1405, 1415, 1425, 1435, 1445, 1455, 1465, 1475, 1485, 1495, 1505, 1515, 1525, 1535, 1545 and 1555; or comprises a heavy chain variable region sequence which is at least 85%, 90%, 95%, 98%, or 99% identical to the amino acid sequence selected from the group consisting of SEQ ID NO: 1385, 1395, 1405, 1415, 1425, 1435, 1445, 1455, 1465, 1475, 1485, 1495, 1505, 1515, 1525, 1535, 1545 and 1555.

56. The antibody or antigen binding fragment thereof of any one of claim 1, which comprises a light chain variable region sequence comprising the amino acid sequence selected from the group consisting of SEQ ID NO: 1390, 1400, 1410, 1420, 1430, 1440, 1450, 1460, 1470, 1480, 1490, 1500, 1510, 1520, 1530, 1540, and 1550; or comprises a light chain variable region sequence which is at least 85%, 90%, 95%, 98%, or 99% identical to the amino acid sequence selected from the group consisting of SEQ ID NO: 1390, 1400, 1410, 1420, 1430, 1440, 1450, 1460, 1470, 1480, 1490, 1500, 1510, 1520, 1530, 1540, and 1550.

57-91. (canceled)

92. The antibody or antigen binding fragment thereof of claim 1 which comprises heavy and light chain variable region sequences which are at least 85%, 90%, 95%, 98%, or 99% identical to the amino acid sequences selected from the group consisting of: (1) SEQ ID NOs: 1295 and 1300, respectively, (2) SEQ ID NOs: 1305 and 1310, respectively, (3) SEQ ID NOs: 1315 and 1320, respectively; (4) SEQ ID NOs: 1325 and 1330, respectively; (5) SEQ ID NOs: 1335 and 1340, respectively; (6) SEQ ID NOs: 1345 and 1350, respectively; (7) SEQ ID NOs: 1355 and 1360, respectively; (8) SEQ ID NOs: 1365 and 1370, respectively; (9) SEQ ID NOs: 1375 and 1380, respectively; (10) SEQ ID NOs: 1385 and 1390, respectively; (11) SEQ ID NOs: 1395 and 1400, respectively; (12) SEQ ID NOs: 1405 and 1410, respectively; (13) SEQ ID NOs: 1415 and 1420, respectively; (14) SEQ ID NOs: 1425 and 1430, respectively; (15) SEQ ID NOs: 1435 and 1440, respectively; (16) SEQ ID NOs: 1445 and 1450, respectively; (17) SEQ ID NOs: 1455 and 1460, respectively; (18) SEQ ID NOs: 1465 and 1470, respectively; (19) SEQ ID NOs: 1475 and 1480, respectively; (20) SEQ ID NOs: 1485 and 1490, respectively; (21) SEQ ID NOs: 1495 and 1500, respectively; (22) SEQ ID NOs: 1505 and 1510, respectively; (23) SEQ ID NOs: 1515 and 1520, respectively; (24) SEQ ID NOs: 1525 and 1530, respectively; (25) SEQ ID NOs: 1535 and 1540, respectively; (26) SEQ ID NOs: 1545 and 1550, respectively; and (27) SEQ ID NOs: 1555 and 1560, respectively.

93. (canceled)

94. The antibody or antigen binding fragment thereof of any of claim 53, which comprises heavy chain and light chain sequences which are at least 85%, 90%, 95%, 98%, or 99% identical to the amino acid sequences selected from the group consisting of: (1) SEQ ID NOs: 2589 and 2604; (2) SEQ ID NOs:2590 and 2605; (3) SEQ ID NOs: 2591 and 2606; (4) SEQ ID NOs:2592 and 2607; (5) SEQ ID NOs: 2593 and 2608; (6) SEQ ID NOs: 2594 and 2609; (7) SEQ ID NOs: 2595 and 2610; (8) SEQ ID NOs: 2596 and 2611; (9) SEQ ID NOs: 2597 and 2612; (10) SEQ ID NOs: 2598 and 2613; (11) SEQ ID NOs: 2599 and 2614; (12) SEQ ID NOs: 2600 and 2615; (13) SEQ ID NOs: 2601 and 2616; (14) SEQ ID NOs: 2602 and 2617; and (15) SEQ ID NOs: 2603 and 2618.

95. (canceled)

96. The antibody or antigen binding fragment thereof of any of claim 2, which comprises a heavy chain sequence which is at least 85%, 90%, 95%, 98%, or 99% identical to the amino acid sequences selected from the group consisting of: 47, 52, 57, 62, 67, 72, 77, 82, 87, and 92; and which comprises a light chain sequence which is at least 85%, 90%, 95%, 98%, or 99% identical to the amino acid sequences selected from the group consisting of: 12, 17, 22, 27, 32, 37, and 42.

97. (canceled)

98. The antibody or antigen binding fragment thereof of any of claim 2, which comprises heavy and light chain sequences which are at least 85%, 90%, 95%, 98%, or 99% identical to the amino acid sequences selected from the group consisting of: (1) SEQ ID NOs: 99 and 104, respectively, (2) SEQ ID NOs: 109 and 114, respectively, (3) SEQ ID NOs: 119 and 124, respectively; (4) SEQ ID NOs: 129 and 134, respectively; (5) SEQ ID NOs: 139 and 144, respectively; (6) SEQ ID NOs: 149 and 154, respectively; (7) SEQ ID NOs: 159 and 164, respectively; (8) SEQ ID NOs: 169 and 174, respectively; (9) SEQ ID NOs: 179 and 184, respectively; (10) SEQ ID NOs: 189 and 194, respectively; (11) SEQ ID NOs: 199 and 204, respectively; (12) SEQ ID NOs: 209 and 214, respectively; (13) SEQ ID NOs: 219 and 224, respectively; (14) SEQ ID NOs: 229 and 234, respectively; (15) SEQ ID NOs: 239 and 244, respectively; (16) SEQ ID NOs: 249 and 254, respectively; (17) SEQ ID NOs: 259 and 264, respectively; (18) SEQ ID NOs: 269 and 274, respectively; (19) SEQ ID NOs: 279 and 284, respectively; (20) SEQ ID NOs: 289 and 294, respectively; (21) SEQ ID NOs: 299 and 304, respectively; (22) SEQ ID NOs: 309 and 314, respectively; (23) SEQ ID NOs: 319 and 324, respectively; (24) SEQ ID NOs: 329 and 334, respectively; (25) SEQ ID NOs: 339 and 344, respectively; (26) SEQ ID NOs: 349 and 354, respectively; (27) SEQ ID NOs: 359 and 364, respectively; (28) SEQ ID NOs: 369 and 374, respectively; (29) SEQ ID NOs: 379 and 384, respectively; (30) SEQ ID NOs: 389 and 394, respectively; (31) SEQ ID NOs: 399 and 404, respectively; (32) SEQ ID NOs: 409 and 414, respectively; (33) SEQ ID NOs: 419 and 424, respectively; (34) SEQ ID NOs: 429 and 434, respectively; (35) SEQ ID NOs: 439 and 444, respectively; (36) SEQ ID NOs: 459 and 464, respectively; (37) SEQ ID NOs: 469 and 474, respectively; (38) SEQ ID NOs: 479 and 484, respectively; (39) SEQ ID NOs: 489 and 494, respectively; (40) SEQ ID NOs: 499 and 504, respectively; (43) SEQ ID NOs: 509 and 514, respectively; (42) SEQ ID NOs: 519 and 524, respectively; (43) SEQ ID NOs: 529 and 534, respectively; (44) SEQ ID NOs: 539 and 544, respectively; (45) SEQ ID NOs: 549 and 554, respectively; and (46) SEQ ID NOs: 559 and 564, respectively.

99-101. (canceled)

102. The antibody or antigen binding fragment thereof of claim 1, which comprises heavy and light chain variable region sequences which are at least 85%, 90%, 95%, 98%, or 99% identical to the amino acid sequences selected from the group consisting of: (1) SEQ ID NOs: 1296 and 1301, respectively, (2) SEQ ID NOs: 1306 and 1311, respectively, (3) SEQ ID NOs: 1316 and 1321, respectively; (4) SEQ ID NOs: 1326 and 1331, respectively; (5) SEQ ID NOs: 1336 and 1341, respectively; (6) SEQ ID NOs: 1346 and 1351, respectively; (7) SEQ ID NOs: 1356 and 1361, respectively; (8) SEQ ID NOs: 1366 and 1371, respectively; (9) SEQ ID NOs: 1376 and 1381, respectively; (10) SEQ ID NOs: 1386 and 1391, respectively; (11) SEQ ID NOs: 1396 and 1401, respectively; (12) SEQ ID NOs: 1406 and 1411, respectively; (13) SEQ ID NOs: 1416 and 1421, respectively; (14) SEQ ID NOs: 1426 and 1431, respectively; (15) SEQ ID NOs: 1436 and 1441, respectively; (16) SEQ ID NOs: 1446 and 1451, respectively; (17) SEQ ID NOs: 1456 and 1461, respectively; (18) SEQ ID NOs: 1466 and 1471, respectively; (19) SEQ ID NOs: 1476 and 1481, respectively; (20) SEQ ID NOs: 1486 and 1491, respectively; (21) SEQ ID NOs: 1496 and 1501, respectively; (22) SEQ ID NOs: 1506 and 1511, respectively; (23) SEQ ID NOs: 1516 and 1521, respectively; (24) SEQ ID NOs: 1526 and 1531, respectively; (25) SEQ ID NOs: 1536 and 1541, respectively; (26) SEQ ID NOs: 1546 and 1551, respectively; (27) SEQ ID NOs: 1556 and 1561, respectively.

103-106. (canceled)

107. The antibody or antigen binding fragment thereof of claim 2, which comprises heavy and light chain variable region sequences which are at least 85%, 90%, 95%, 98%, or 99% identical to the amino acid sequences selected from the group consisting of: SEQ ID NOs: 2619 and 2634, respectively, (2) SEQ ID NOs: 2620 and 2635, respectively, (3) SEQ ID NOs: 2621 and 2636, respectively; (4). SEQ ID NOs: 2622 and 2637; (5) SEQ ID NOs: 2623 and 2638; (6) SEQ ID NOs: 2624 and 2639; (7) SEQ ID NOs: 2625 and 2640; (8) SEQ ID NOs: 2626 and 2641; (9) SEQ ID NOs: 2627 and 2642; (10) SEQ ID NOs: 2628 and 2643; (11) SEQ ID NOs: 2629 and 2644; (12) SEQ ID NOs: 2630 and 2645; (13) SEQ ID NOs: 2631 and 2646; (14) SEQ ID NOs: 2632 and 2647; and (15) SEQ ID NOs: 2633 and 2648.

108-153. (canceled)
